United States Patent Application Publication US 2007/0054278 A1 - sequence listing, part 70

SEQ ID NO: 95826 - DNA, 75271 bp, Homo sapiens
cacatgcacatccacgcacctatgcatgtgtgcacttgtacaacacccttacacatatctacacatgcatgtgcacacacacatatacacacacatgaatggagacacccccacacgcttcccacatccgccccataccccatacgtacactcacagacacagacacacaactctacacacatgtgtacataaacatacatgtacgcatgtacacacatacacgaatacccacatacctacatatggatatacgtaccctcacttacacacacacagacacaggcacacctacacacacgtacacctgtgcacaagcacacacatacaggtttatacacatatacatgcccccagaaagacagatacacacacacacacacacacacacacacacacacacacaccactctgcaaatagcctggttacataccaagttgtgatgtgaatttccatctgacctcacactgaggcatttgtcacaattcataaaccaatactgatacattagtatttttatttttattattttattttattttattattttttgagatggggtgtcgctctgtcacccaggctggagtgcagtggtgcgatctcggctcactgcaagctccgcctcccaggttcatgccattctcctgcctcagcttcccgagtagctgggactataggcgcccgccaccacgcctggctaattttttgtaattttagtggagatgtggtttcaccatgttagctaggatgatctcgatctcctgatctcgtgatatgcccacctcggcctcccaaagtgctgggattacaggcatgagccactgtgcccggccaatacattattattaactgaagtctatactgtattcagatttccttggtttttacctcatgtctcttttctgtctcaggtttccacattacatttagtcgtcacgtctccttgggcttctttttgctgtgactgtttctcagaatttccttgttttttgatggccttgacccaatacttgctgggtatttcatagaatgttctgcaatgataaagttgcctttttttttttaaatcacatcatactatcaacatgatttgccattgttggtgctgaccctcactacctgggtagtgttcgtctggtttctacgtggtaacgttgctctgtttctctgttttcatgctgcactctggaagaaagttaccatgtgtagttcacacttaatggggagttacactccaagtccttgaggtaaggagtatttatgtccattatttataattcttcagcatgtgagatttgtctcttctcatccacctagctgataatgtatttatatcactatggaggaatgggtatttatttatattttggataatttctcctcatgtgtatgatattttactataaaaagttaaaagtgacgcagaaactataaaaacgaattttatttgataacaaacaccgtggtagtcaagaatagggcacttttgttaaaagagcaaataagtctttggacacataagcaaaaataaagcttcaaggataggggaggtgataatcttactctattctatgttctttgcactgtactgaaaatattgtgcccagttctgggcctaatctttcaggggagatgtaagtaattggatgccattctgagaagtggctgcagatccctgaaaccctatacaaaaaaaaaaaaaaatgagatctgacttacttggaatttatgataattgaggagtttagacatctttaccacgtattatttcaaagatagaaaaaaggcatggtccagccccaagttctggctatcttctcctagtctccccactcctgcccactgtataaaatagataaatatgtaatacatgatatttgcgcaatcacaaacactccaaacattagttatcaccctaatgctcaaaaagcaacaaacgaacaaaaaactcgtattaccaacaagatctctgtgatgtccctgagatgatctgttatggctggtaccaccctgtccatgtcctgaactttgggtcactatgacatcaacacacagtcattctctgcttggcaaatcatgccgtcattatgttaccctcatcataggaaaatgttcttcaattattgtaacaatgtgattttaaaaatgtttgagctctgaaatatctttcaaatatctgaaagaaatagaacaagacatcctctgactccacgtggagtgggaagacaaacgtcaagatgaatttgacctagaggagaatgttctaatatcccgagccatcttgaatgggaaaatcagccttcagaggaagtgaagtgcctgttctcagagatgttctggcaatagacaagatgaccacttggtggggatgttacagagggaattcccattttagatgggaagttccttcttcaagttctcttctaaactcaacatccaccaattctaagaaagtgtacattggaggattctcagcatttttttttccccagcattttttgcccagcaattttttttgggggggcggcaatcctttcttttgggtaggatgttttgttttcagatggcattttccaaaaggcccctctgctggcaggaggaaatgacacattgacccactggcgtcattagcaagaatgagttggtccaattggctccttttccctggaaggctgagagcaagcctgcaagcaaggggacactggccaagccatgatggcctcgagaatagcttcacgacaaaatggtggggacaaacaagggacacgatttagctcaataggatgcaggaaatcttcattcagcggtagctctgagatggactgaccctgaggttgggatgaggacattcagggcttagaaaggattgggctagttctcacctggggattctgcaattccatatattccccaactggtaaatagccttcctttccaccaccgtgcacccccactagtctctgctcctgcagcaggcctcctggaagcactgcgtcctcaactctgcaaggccaggaaccgggtctatattgttcactactgaattcctccatggctggtgcagaactggccacctagaagactctcaatagagatgtgattcttcctatatttttccaacaaatattaattatgtacatgtgatgtgccaggcactggactgtgcacgtggtgaacagtaaaggaaaaacaataaacagataaggttcctgccctcatgaagtttatggtctagtaggggagacagaaaacgttcttaaactgatcaaagtaaatatataattgtggattgagctaagcgcaacaaaggcaatgaataaagcgtgctgataggagatactcagattgggtgacaggaggtgatgtttaagcagatatctgaaggatgacaaaggaaacagccgagtgctgaactgaaagaagaaataaatgagtgaggaggtagctgtcaagaacctctctctctgctcagaggaaaaaggctaagaggcagtgggtactctcaacaatgagaaaagtgcctaccatccatgagtgcctgtaagtgccagggacgatgcaagaatggtgtcattcacttttcaaaacagcccttggaagaaagactcctcctaccgccaatttacagaagaggaaactgaggcttaggaagggcaggtaacttgcccagtgcctcacagctaagccaggattcgaactcaatttagaagtctgtgagacccgaaagctcatgttcttaatactgttcagccccttcaccatcagggctcagggagtatccttcatgggacttctgtgtggcctgagggtggcttttgctcatagattttaccctccccttgggagccccaggacagagtaggtctgggaactcgcaagggctgcctccaggagaaaagccacctctctcaagtgggcgtgcacttggcaggaagcctgcgcaggtgtttggctcagcccaaatgtgggagccactgaccaaatgccaagactctcagcgaagagccatagctagtcctgtctccccacctggaagctgtttttcgaacggagctaactgccaggatgctctgggctggtgaggccacaaggattgtgagaggtgccctgtggctcagatggcacccaggaaggaattggggtctgttgagggagggagagttcagggctagccaaaggcaattccagatccctgcccctaagcttcctggcctggagctggtaacgtctccctgactcaaatgtccatgtggctgggagggcagacaacagttgccatcactccacgcagaccctcataactgccttgttgtccaaccccacagtcccacagcacagtaatggttcacaagacactgcttcccaccccttctcccttgggtcttgagttggctttgagcccaggtgggctctgcctcacctccctttacaggggatacgctgctgggtcccttccttcccgagtcctgcctccccaacatcatccacaaaaggcatcctctcccttcctcctcctgcccctcatttaactccagcacgtgttttgagacaagtctatactccactggacactttgttttacacgacttcctcttattcttcattctcctcctgtttaaaaaacatgaatcactagcatttatgaggttccttctactgttccaggcaggatatgatattattttatagccaaagggatgaagatctagggaggtgaagtgaccctcccaagactatgtaattaataagtagtggagttaagattagatttgaatagagggaaactgacctcaaatagagaatgtttctctctagctatgccaaagtccagcctttatcacaaccttgcctccctccagccaggcatgtggcccacatggggcaygccctgagcccaggtgcggtgacccctctctggcttagcacggttaggtggtgctgtagttgcagagtgctggcttttaagccgcttgtgagtaagggatttattttttcccagcctcagtttttctctctgtaaactgaccataataataacacccacctcaaacagttttataaggttgaaatggggtgaaagtaggaaagatctagcacataatgcactaattttttttttttttttttgcctaaagcaggcagtggaatagaatgcttaggggcatacagctctgagatcaggctgcaagactccactgctgtgtgatcttgactaagtctcttaccctctctgtgtcctggtttcctcacctgtaaaattactataatactagaatcaacttcataaggatattgtattcaaggaggatgagaggagtcccagtgaatggaggctggcatagaataggcttacaataaagagaaagaacaaataagcagctatacacagcctctgccacaaaaaactaccaatagatattagccgctattagttaattgtcattattatctctccctggcatgtttccactcaggcaagaccaaagcactttcctctaccaaggaatatcttcctctactttcatatccctctccatccaacccttcagcctgcctcagttgggatttgtaggagtcctgaagctatggaccagatcagaggtgccttcccttccagaatctattttccaaacttcatcgattgcctatatttatatgcatgcatgcacacacacgcacacacacacacacactctcactcactcccgagtcagaaaaaggactcagcacccagacatactgcaggctcttgaagaagacagtattttcctgtgagctagaggatcttcctgttattctccatgcagttcaaattctgtcaattattatccagttagtcatcgctccagaggtggactgtcattaaaaaaaaatagaaggtgtgtgtttgtgggtgagtatgtgcatgtgttgtgtatgcagggggtggggaggggcgagagcggtcaaataggaagtgccttggtatttatgttgaagtgcacactggtttaaattacccactgggaatatgattatgcttaatctatgctcagtygaaaggggctggggctgctttctcccctcccttcttgactctctgttcacagaactcaggctgcctccagccagcctttgcccgctagactcactggccctgagcacttgaaggtgcagcaagtcactgagaatgagcactttcttctcggacacagcatggatctgcctggctgtccccacagtactatgtgggacagtattttgcaaatacaagaagagctcagggcagctgtggagctggatggtctgcctggcaggcctctgtgcagtctgcctgctcatcctgtcccctttttggggcttgatcctcttctcggtgtcatgcttcctcatgtatacttacttatctggccaagaattgttacctgtggatcagaaggcagtcctggtgacaggtaagcagacggtgctacaattttcactgagggtatgatctgaaacttgctttgccttagcaggactttgtcaaatctggcttaaaaataaaatacttggcatggagtaaatgaaagccctcacccaagtatttttcatgacactgttttcgttccgttttttccaggaggtgcatttgaaggggctggtaktgggagggaaggagaggatgaagtgcacccagacaatgattttgttaaaatttcccaggaataaatattaataggcaaaatggcaatatttcatgtgttctattgtacccaggaatgtcccatagattgttttttaggcttaaatggacttttgttctgacatcattgtttggccaggttctccacctggactcttcttccctaggtatgcaagaacgcttacaagccaagttctacttgtcccttgctgttttgaaatattgaagggattcacttacctgggctggagactttgcagtttgcttggctgctgtcaagaaccttgtgtcctgtctgaactgttcctcattagacctctaatgtttcttaattggaccaacttggcatcgtgtccaacattcagttgcctgttagctgagctgccagtttttcccttgtttgtgtgtgtgtgtgtgtgtgtgtgtgtgtgtgtgtttccccattgcaagtgtgaggccaaattaaatttctttgagttgtaaaatttttgcttggttatggagtttaagcttggatagggctgtaattaggattatccagcgttatcctaacccagaaagccctaccaaataaaaaaaaaatcagctgtggaatcatttgggggagatcatcacccctctgaccatgatcctcagggtgaaggcaagaatggcatggggatgtggttgggagaaaatctggggcttgacaatttgcagagaaacagactttgtttttgggttaaagtaaaatgctttcttgaaacaaaaygcaaattggtgcttgttggggttagacaagccacagaaaagaagcttctttaaattaatttttgaaagtttagagggagaaaattcagtcaatgggatgtttatctgcaagaatgtctgatatcacctggaatcatgtatctgggagtctggctggattttccacttttttattagaattctcaaatggcttatcggtgaaatttgtaagagagtctcaattttcctgttctgtgtcctgttctgttatgaaaccttaggatgagctcaggcaaaccacagggtagctgagaaaatgggaatcccttcttgcttgtttattttgtcaacattctttatcctctgcatttcaagatgcaggtgttaattaatgctcacaaaatatgcacccaactcagtgagcccacatcagccactgaaaggtgccgtgcwtttagtgttgagtgaggatgattgaatcaattaggcaactcaagctcaaggactaatccctgcatgaaatgcttatggcaatgaagaaagcttagaattaagatgagcactacatatatttaaggatgactgaaatgtcactttcacgttctttgttattttcaagttctctgtcatttttatgaggaatgcyatgtgctcatatcatcctagacaaggcctcaagacctttgtatgaaatcgagaaatttaaaatgaattcattttgttagaccacaactctttaaagaatgaagaagccacgctgagtttggaataacctttgttccagattggcttatgataacatagattagcacgcattgtggtggggcaggaccaaagaaaaatgtggcagtgtacatcaaaaccatacatatggttcctttatctgataattcaagtcttggaaatttattttgaagacataatctgaaatatgaaaaaaagagtagaagcaaaaccaaaatggcacattcaacacaatcttattatttaatttagattaatattaaatatcaaaagcaacaaaaagggtgataatatatggtacatcctctgggtataacaatgtgcaaccattaaaaatgacagccacaaggactgtgttacatggaaaactgcttgggccaaaggaaaacacacaggaaatcccagggttggaacaagtctacagccacgtcaaatgcatagattcctgggctgggcaaaaagctgtgataacagctggaagaaatagtttgtatatggttggattagtgtgctggaaatagtttgtaaatgaaaggaaatagtttataaaggaaatagttggttaatggttggattagastatttrcgtgttattttctcccctggatttcaaatttctctggtgtgattacattactcatacaataaaaatacttaaaagagaacacaaaacagctaaagctccttttagtttgtatttaattttggacccaggtgagaggcaattacaaagacaaatttaaaaaaatgacttttttctcccctttgagccytttatttcattttgctaagatgttcaaaagtctgttgcctcagagacaatataattacagtaagaaaaagtaagcaagcatagagtgtttgaatacatatttgtcttcaagatacctgaaaccacagaggccattcaaatatttaaaatgtatgtgtgatgcattttattttattttatttcattttattttttgagatggggtctcaatctgttgcccaggctggagtgcagtggcatgatctcagctcactgcaacctctgcctcccgggttcaagtgattctcctgcctcagcctctcaagtagctgggattacaggcacgtgctaccacgttgggctaatttttgtatttttagtagagacagggttgtatgatgcattttaaatgtataactgtaaaatgaacaaagagcagaccaacacgattgtaawaacatctcaaccacaacatagtgggaaaaaactttsaagacacacaggcttgggtttgaatcctgcatctaccttgccttaggctaggtccccagaggcagtgctttctgtgaggatttgtgggaaagatttattaggagggtttccagagaagatgggcagggaaaaggaagaagccaggtaagggtgagacattgagaagtcctctgaagatcacttgggcttgatcaccctgggcggacgtggggtggtgtggatcactcatcagagctgtgccaattggagactagagagctgtagtctttatgccttcacaccagtcaatcattagttaagggcagtcacccctgttcccccttggttgtgggcaggaggggagacttaattccatgcacttctggcaccatgtggacactggctggcaaagtgggttctggtcctttggggaaagaatcgcaggtgctggctgctgggagtcaaagtgcaccatggattgatgcacacaacagtgggagggttctgggggaatagsatcttatttgctgcatctttattactagctgtgtggacagctgtgtaaactttggtgctcggttttggattttgggactctgttttctcctctgtaaatggaaaataatacacacacacacacacacacacacgcacaaacacacacacacccctgcatatgttatactactatagatggagttagcagatgagagagagagagagagagagggagagagagagagagagagaatgactgtattggggtggtgaggggaaagcttgagtagttaggaagaacatgaaggaacaaaaagaacaaaagaaaacgttgacaaacagagagaagaagcattcatgtattcactcaataaatattcattgagggcccagtatgtgccatgcattttccagaagcaaagggggaagaaaattttaagaccaggaaattactgtcaagcgatgggatcaaaattcctacttttccttcatcttggacacacattcactggagttccttccccctcttctgaggttacacgttgtccttctcagcctaccctctaagcttggcaggagatgcacaggtaactttaagtttctatcctctggcctttcatcctgccccctccagtcatctcaaatattgagaaccgactcagcatctactgtgtacagagcagacacctcagggcttcatggaccactggggaagacacggccacacccaactgtggctgtgtgatggggcacataagaaacctccaggttcattcccaaagcggatcccaggcagacacaggtcttgtgtgtggagctggggaaagcttgacaaaaaaagagggacctcgttaagaatctaaaattagttttctagggggaaagtgagaaggtattccagcctaattggttaagtagctacaacaaatacagctagcactcaataaagcttgctgcattagataatttttaattgaaaatttcaaaactggatatattggagaacggatccaggaggagaagtaagatctgttttcagtgaaaatattttatgctcacaagaaagtgtctcacgtgagtgatcatcccttcttgcaattactgaacagtccaaataaggttctcaagttgaataccatgggtatcatcttggggtttggactcctttggatttcacgttagattattaagatggataaacattgacagtggactaagagactaagagaaataacatctctgtgctctaacctttacatgcattttatatttgattctcacaaccctaataattcacatttgtaaacaaggaaatgcgtccaaagtcactgagctactaagtagccaagattggactaaacccagatcagatccatctctcaccaaaagccatcctcttaaccactgtcattagaagtgttagatccatagttggtattagaccacaaaggttacccaggatataaaacgtgtccattcaatcaacaagtaaatattgaacatctgttatgtgcccatgactctgcttaatacagagcttggcaattgattgggtgtagaagatgcttatgagggatgatgaaataagagtaccatacacagggctagggatgtttgcagagggtgatgatttgagacatgccatgtgctaagcttgacttcagaactgagtctgagagcagtgaagggtagttcaagtgaagtgtcactggaaattggaaataatgaaatagaacttggttagatttgtagatagatgctggagaagcatgagcaacaaagtgatggtggatgttgaaaggatggcccttagtgagtctataattcagtctaccagatgatttttacatgaacaaatgtccccacttatcatgcggtttaagttttacctttacctactacagggaagcataaaaaaggttttgataacccgggtaattttgtgaaagtttgaacaatgattgtatcaggcattatagatggagtgttttgactggggagtattctgactgcatggaaatccatgccaactatactgcaagcggcttgaaggcaggaaccaggtctctttttatgaccatgtgcctcttctcagtctctcagcacgttaggcctaacacagtgttaatgagcgaatgcacagtgagtgaaccaaccatgtgggtgaaacgtcctctccttttcatggtcgttagttggacacaataggattgtcccaatctgcccactcacttaggtacttacctttgctgttctttttgctggggtcatttgcataaaaagggcagagtgacatggctgagctgttggaagctccattgttctgtagtgacttaattgttggcttgccctggacaaggctttatgctgatttggttctaagcgtgctcctgcttacccaggatgtggcacaaatagaacatccactggcttccaccagtctgctgaaactgctctctaagtgtcactggtgtccttctaatcaccagagcttgacttctgctccagcactgccgaccatactttctttcttttcatggcctcgttagccttgcaggaactgcatttccatgcttctttgtcctttgactmttccgggttcttcctacacttcctccaaggtaatctctgactctgtctttactccaccttcttatatggctgcattctctacccagcagcaaagtcatacctgctcctgtggtatcaattatctcctctgagagaggactggcaaatcgtggttttgtatacctgacattcttctgagctcctgactcatatttccagaattttagcctgaaactttaaatttggcatgttttaaaaaaaatttatcatctcctcttgtgatccttttccctttcttttcttttcttttttttttttttaattttttatgcacagagtctcgctctgtcacccaggctggagtgcagtggtgcgatcttggttcactgcaatctctgccttccaggttcaagcaattctccttgcctcagcctcccgagtagctgggattacaggggcccacaaccatgcctagccaatttttgtattttttagtagagagggggttacgccattttgaccaggctgggcttgaacmcctgacctcaagtgatcttcccgcctcagcctcccaaagcgctgggattacaggcatgagtcaccacgcccagcctcccacagtgctaggatgacaggcgtgagccaccacgcccagcctcccaaagtgctgggatgacaggcgtgagccagaactatcgcacttggcctcagtgtctaaaacttggtggagggtggtaagttccatgcaaactggagcacatacctcatgactagagaaggcagctgcttcctatttccagtcaattattgccactttgccatttttgtggtatttaagaggaaatagaaaattgtggatctttgtgtgtgaaatctcccatttaaaacaagttggcaatgatttctttcttatattatattttattttattttatttattattttttgagaaggagttttggtcttgttacccaggctggagtgcaatggcacgatctcggctcactgcaacctcctcctcctgggttcaagcaattctcctgcctcagcctcccaagtagctgggattataggcacccaccaccatgctcagctaattttgtatttttagtagagatgggctttcaccatgttggccaggctggtctcgaactcctgaactcagctaatccacctgcctcggcctcccaaagtgctggcattacaggtgtaagccactgcatctggtctctttcttatattttaaacaatcccatagatcaaacagaacacattcttgtggccaaatgttagcttccaacttctgctctggttcctgcagagaggagcaggcagagaagaaacttttctcttgcttatgcagttgcatctcttgacatcatttctgtgggttactttgctgtcagggcctctgtcttcttattcaggctatcacagactccttcaaggaaggatgaggggagaaagaagctcgtcttgggccaagcttttccctagtggagcacatagagctttgaggcttccatgttccctcccattagcaagtgcaatgtggggactggggctccccaggcaggatctggccacatgcaaggggtctcccctggcctgccctccttgtttcaggtcacttgtgatattggggggaaaggggtgagcagccaagaacagatcattcagccactttagggtttataaaaatcatatagatggccgggcgcggtggctcatgcctgtaatcccagcactttgggaggccgaggcgggcggatcacgaggtcaggagatggagactatcctggctaacacggtgaaaccccgcctctactaaaaatagaaaaaatcagccgggcgccgtggcaggcgcctgtagtcccagctactcgggaggctgaggcaggagaatggcgtgaacccaggaagcggagcttgcagtgagtcgagatcgcgccactgcactgtctgcctgggcgacaaggcaaaactctgtctcaaaaaaaaaaaaaaaaaaaaaaaaaaaaaaatcatatagataaactttatttcagacccaaccatttcccaacacctgaacaccattttcaggatcatcccatttcatccactggggttttgaataatcccagtgacagggagttgaccccctattggtggaagttatttcatttttatacaatgctaatggttgtaaatatcttccttataatgagcgaactattcttcccttgaagttaactctgctcttggaagtcacataatctaattaaagtattattttgcatgattgcccttgaaacatgtggactgcatcatatcagagtcaaatcttctttgaactaaatcttctcattccttttaccattcctcccatggcctagtttccagaacgttcatcattctatttagcctcctctgaaccatttccagtttctttcttgacattcctctgagctgttgactcagagttaatatcacataccatcttggtatgagcaacacaaacccagctggaactaaatgaggtgaaattaaatcagaacagatgcagggttcttcaccacatgctgttgctttgtttggtggggtcagtccctaaacagaatttcccctgaattctgaaccaatggagaaatgagacagggggcttaagacatcagctttattcctgatagatgcattggagcacgggtcttaggcatgtggtaataacggtgctcagccaaggcaaggtcgaaaagtctcaggcctcacccacagatggggcctgggctgggcagctgggcttagcacaggtgtttataggctgggaggttggaaggaagagacaatagggtccacgtgagggtctggcctcttggattttctcctctccttctcagtcctgatcatttcctccgagttgtcatttggttctcctgctagagagagaaaagacctttgcaccaggcaaaatgttcatgtccaattctttctgccaaactcaccaatcagatactttgctccacctccctggggggaggagggtagaggagccagaggggccaggaacgtcacactgaaagctatccctccatattgcagacagcataggaagtggggaagaagtgttcccctgtcacactaggtccagaaaaccaacacttctgactgggcatggtggctcacgcttgtaatctcagcactttgggaggccagggtgggcagatcacctgaggtcaggagttcgagaccagcctggccaacagggcgaaacccaatctctactaaaaatacaaaaattattagggcatggtggtgtgcacctgtaatcctggctactctactcaggaggctgagacaggaaaatcgcttgaacatgagaggcagaggttgcagtgagctgagatcacaccaccgcactccagcttgggtgacagagtaaaactctgtccaaaaaaaaaaaaaaaaaaaaaagagagaaaaaagaaaagaaaatcaactctctgaatagcggatgctgtgtctaaactgcaaactgcagctggtatgaaaatggtccagggaggtttgactgtgaacttaaatggggtcagcactgggctgtttacccccagtgagccccccatccatcttaagcttccctcttaagatatacagtatctaaatgaagatattagactactcactagttctgcactcatgagaaagctgcttcacctctatgaggttaatttttctcacatataaagtggaatcatgattgatatctcttctaagtattaagcaagattgtgaatatatattgctgcctgatacgtagtagctgctttataaaatataatgatttttacctattttctatcttttccagttcagtaatccccttggcaaaggagacaaaaggaatataggcgatgagagttctgccttctgggccattcattaatgtgcctcatcagcctcatacaatagtgccctgctcctttgttcttttgcactctgactgtttcttggctagcaagccctctttttgtagcagacttgctttgcaggtctcagcttaatcccagttttcactgacagatgcttctccagtgttgagacccttggctctgtgctgtctaactttggttcatgcccttttaagctctgacctctttgagagcttctgctgggaccactctagcctcttgtgttttctctcctgattcttctcagtcctgataatttaccctgagctgtctttttggttcttctgttacagagagtctttgggaggtgctggactgtgaagacctttgctctaggcaaactgttcacctgttgcattgcctcctgagtccccatctctctatgaggcagggcattacctcttaggtggggagcgaagggtgctgactgggagcaggatgtgtgattgatgtgagccgtggctggggccgaagctggttgttttcacagctcatgttttcagtaccaattgcctactatgcacrctcgagatacagtgtggagcaaaaacagaataaggccctgcctcatgaagcttaattctagcggaggaagacataacacaacaaaccaatgaatggataagatgatstcggtgccacaaaaccctcatggccaggacagtggtgtgactgtgctgttgagagccaccttgtatcagaggcttcctatgtgtcagatactgtaaggagcactttccatgcctaatttcmtttaattctcacaaacgccttataagataatttaaaaaaatattatgggccaggcacggtggctcacgcctgtaatcccagcactttgggaggctgacacaggcagatcacttgagcccgggagttcaacactagactgaggaacatggtaaaaccccatatctaccaaaaatacaaaaattagacgggcatggtggtgggcacctgtaatcccagctactcggggaggctgagccaggaggatcgcttgaacctgggagycagatgttgcagtgagctgataatggaaaaaaaaaaatcatgaaaatctttaagtgtacacaagaggagccaatgtacacagtatactcaatacccctattctagagtgatcatggtccagatactgatgaaatggtttttattattaaccccactcaacgatgaagaaattgaggtttttcaagagtttacataactaaggccaagtgacaaataagtaattggcagtgctggaattcaaatgcaggtcttttagctcaagaagataatataagcagtgcaaaaaggtagatggcaagtgtgctccccttgagggaaaggggtattggctgccatctttttcagacctgctcagctgacccaagcaccttccgcattcagacacagaatcttatgcaaagctgactttcattccttaagaaagagaactccttaccccatrgcaccagagaacactaaagactgaacagccaggaacttcctgatctccctccattagcaggggtggcacttctccagtgagcaatcataagtgctctgtgctcatgaagcttgtcactgttttccaaatattcccagtcatgcccggggtttgttacctggctacctttagattactacttcagaacctacctggtatgttgttaaagaatgaagtttagggaagagctagagaagaagacaatggcataggagggttttaaaaaagaactctrattagcagygtggaaaggggattagaatccattcattcgttatttcaccaacacttattgagcaactctgtgcctggtactgggaatatagtggcaaatagtatgcgttcatgacattgaatcaacttgcagtatagaggagcaggtaggcaagaagccagtatattgcaggacagtataatgtgtgagagttcagagaagtgggcagaagtgagaagaggcaagagsatgtaggagactggggtagaggccatgagttggaagrgcaagcagccaactggagggactttatgaaggaagccctgtaggacttgctgtcttattggacctaggcagagaagaaaaggagagacccactgcacattggactctccctatcatggctctcatcatatgccctttctgattcttcttttgactgcctggatttccagatggaccatgagctccatgcarggaggcactatggccccagtgaaaaacatggtrtccacaacaggctcaaggaatgaatgcatagacaaaggaaygtagagaatgattctgagggtctgagggtgatttttacaatgaagagaaaccataggtcttgcgagactgaggaagaggagctgactttgcgaaaaatattatatcttttgtttgagacatgttgaatttgacatgccaaggttgtattcaggtggtggtgtccaaattaaattggagaaatgaggctaaaatmcaagaaacagcccaagatggaagataaaattagattaatcttccacataggtaggacaaatgaagctctgaaacctaaaaagatatctgagagacgagtgtagacagagattaggacagggcactgggyggtggggtccactcatacctataggataggaggtggaagggagacctgggtggtgtagggttccaaggaaaatagttacaaacaacatccagtatggaggagagagaaaatgagatgagctgatagctctgctttcactgccttggggataccgattagagagaattctttcaggaaagggyacaggaaggagtcccagtgcaaaggcagcaaggagatgatgttagtgagcaactctgaaaatttgagaattttggtggaaaagggaaggagaagatggggaattagctccagggaacatgaagatcaaaagaaaaagtttggtggaagagagaaatttggggagtgatttggagacccagaaggaaggacttgaagaagagacattaatagtacaaaaaggattgtgataactgatgaactaggaggctgttgcttaagagataaagaaaaagtggacactatagacatcgcagcttttgttctagtttgcaaggctaatatgacatgttattggttagaaaggcaatttacttatataggaaatcttcaattgtttgtggtgccagtgttggttatagggtagttgtataagatgtgacaatgtactgcttgtagtcagtagaatagttatgagaataaaatgaaatgagcatgccaaatgcttagtgttgagcctggctgcatagtacacaaacagtgaatgctgctgtaggaaatcaaagaagacaaaggacaataaagtaaccagagaacgcattatgatgaaaataatcctggctactttctgggctggaacaggtagtcccatgttgagcttatatgtttctgttcaattacatctctcctgtttatgaccctttcatattctttatcagcattctctgtgactatttatttaatatactcttccctctcaagcaattgttctttactgggagcaatttggttacctaggggaatatttggcaattctggagatatttttggttgtcaaaacctatagggtagcggggagtgacaacatgctacaggtattgagtgttgaggccaggatgccactgaacattctataatgcaaaggacagcccctaccacaaaaaatttacctgacctcaaatgtcaatagctctgaagttgagatactttctcctagatgacgggtcatgtcattcatgtgcatcatggtttccccaagtgccaggtacaaagcaagtcacatgatgggtgccccataataataaagggaatggagatttaactgcaccttgaagaataggccaggtctgaatatatctcctgctttgagtacaaggtgtcagaagatgctgtgagcatttcggaaagaaagttcacaagagagattgcaaacattctggctcccaaagaatgaaagagaggaaacagccctggggctttatcaggagactgacattcccataaacaagagagtcttggaacaaaaggtctggaactgcaggtaatacaagaacacccaagactacaagcagttcattgtttttacagatagacttcagccaaccactgaagcagcagagatggaatttttaaatagacacaaactagagacagttcctttggtaaggcacaaaggtgaggcttctcagccccatagtggggctgcatgcatacagagaaggtctccacctcgggacagcttcttgaatccggtggatatcaactgtcactgtgtgtcagaatcaccttggggcttttaaaaaataatgatgcttgggcacccactcccagagctcaagtttacctgatctaaggcatgtgcctgggcattggtgtttctttagagcgcctccgtcccaggtgaagctaatggatagccagccctactttacaaatgaaccacagctcaaaatcttgtataaacaatttctctctccaacaccttatgtactcagttccactggatgtcttgcgctttatatgcttgaaactgagttcttgatttgggacccttccctacctggcccttgctcagggttccccatcttggtgagctgcactacccagcattctgtagtgaccagaatcccaagaactccccttcattctcatttctctgcccatcttctcccctgcccgcccatatacaattcgttctcggtgctgaggctattactttccaactgcacctagatatgtccacggctcgtcacctcccctgcttctgatgtagtcaaagctaccgtcatttgttctagggctactccctggcctctgggattccacttttgtctctttaagttgttctctgcagagtaggttgagtgtctttttctggcttaagacccatcaaaggctttctgctgtagagaattcaaacccaaacttttgcccaagaccagaaggccctgtggaatccgagcccccagatcccacacctctctcccctgctagttagcttgaagcaccaagctctaaagtctttccatttactgttcttttcaccgggaatgctttttcctccaccctttacaggctggcttcttcttcaccttcatgtcttagtctaagacatgacaattaactgcttgtagtcatgcttttgttttgtttttgtttttgtttttaaatcttggcactattgacatttggggctggaaaatttctttgtcgttggaacttttctgtacattataggatgtttagtctctactcactggatgacacaataatctgctccccagttgtgataagaaaaaatgtctctagacaatgccaaatgcctcatgaggacaaaatccctgccaactgataactactagcttaaatattaacttcttgaacaggtattctctgttctccaggctttaagtctccaggtgtatttctcaatcttcatatcctatttgttactttcatagaacttttctcaccttgaaattgaatatttatctagtaaatatctgtgtcatagtcccactagactatcttgactatttcattcaattctgtaatgatagcattgcgtacggctcctggtatgcagtagatgcttaataaacttctgttgaagaaatgcatgcacgcatgaatgaatgcatgagcaaacaaagactgctaggcaggcaagtgccttcccgccagggttagagagattatctagcagtgcaaaaagaccatggactaaaaaggaatgagataatgccccttgcagagacatggatgaagctggaagccatcatcctcagcaaactaacacaggaacagaaaaccaagtaccgcatgttctcactcataagtgggaactgaactatgagaacatagggacacagagagagtaacagcacacatcggggcctattggggtgggggtgagggtgaggggaggggaagtatcaggacaaatagctaatgcatgcagggcttaacactagggtgacgagttgataggtgaagcaaaccaccatgccacacatacagctatgtaacaaacctgtaagttctgcacatgtatcccggaatttaaagtaaaataaaaaaagaaaaaaagagcatggacttcggaatcgttagttgcagcttctcagctctgccagcttcttgctgtgtgacctgggtcagaaaattaacatctcagagcctcagattactaatctgtaaaatggggatactacttttgagagtttgcttaactgtgtaatcttccctgctctctcccagaccccacgggctttggatgcttcttcatgtgcccttggcacctggtgcaggtctctatcaagggctcaccrtcaccaaggataggatcacactgtgccgtcagtgccttatacagagccaaccacatcataggtgctcaggaaataatgtctgtgcggtgtatgaccaggaatcaagtcgtatccgagatttgaggtcttgtaggtagtttgctgagactattcttatacgggttggtccctggaaaaatgagcaatcccaggtccttccttggtgggctgtgggaatggggaggctgtgcccctctctgttgttcaggtgggcattctcgtttgccaaaaattgagaagctacgcctggatcctcttacctctttttctgttttggtcttctgcccaggcctttgcaaataatgaatttaacaaagatgttgtctgagtgtctcttagacccagggaactgagtatgggcagctgttcctccttggtcagagcaagcgaactgtcatgtatccaaatgtttctagcgagagggtcctgtgaatggaattgtcagtgagttctagtttgctcatagcatgagtctccctcagggagcaacccttgaggttttctacctgctcagaaactctctagagaaggctacaccctgggcatgcatttcccttgaactagcttttcctagtcccactaggagagtaaatgacaaagctgggccctgaatctaggtcttgcccatctctctatttttttatgctcaaaactcacaatccagggaaaaatatcctttctcttagcttgggcagtgttgggcagtctactgaagatcacatgtagtaggagacaggtagttcactttattggtctcctggaactgctgtaaaaaagcataacagactgggtgccttaaaacagcagaaatttattcactcacatttctggaggctgaaaaactgaagagcatggtactggcattgctctttctttctgcatcataacatggtggagggcatcatatagcaagagggcaagagcatgccagcttaggtctctcttcctcttcttataaagccaccagcccctcttgggggccccattatgaccttatctagacctaattacctcccaaaggctccacctctcaatgccatcaacatatgaatttggggattaagtttactacacatgaaatttggggaacacattccaactatagcacttattagctaaaagttgctaagaacttttttttctggtagcacaggttttggctgcatggcaaatgcagaagtcaacagaaggagcccacgtacatcagggaattggtgatcagagtcacctagactgcaggggaaaaagccaaaccaaaagtcttacaggtagagaagatttggaagaggcacacatcccaagcaaactacaattgatgcacccctgcagagtctacagaaatgaaaagagaagatcgaaatatcatcatttttcattctcccgagttttaatttttatttatttattattatttatttatttattattaaagtagcagagattgaaaactaagataaaaaatgccaacataaccaatgatacgtttagcaggattggggaaagttcatagcgctagccatggactctgagttctccactagactgtaagaccttgaggccaagaactgtgtccatcttggtcaccattgtacctgtagcacctagcccagcatgggggagcagagagaagctgagtgaattgattaaattcattggttgtggctgacctctaaagatgttctattaactctgagactgtgcacagagaagactttgtgtgctgctgtccatggaaagaaagcttcatcttgtgttgctgctggggagctcaaacaacactggacatggatggtactggactggtagagcatctccctcttgtattatgtaaagaagttctaacatagaatgcataaccatagatagaagttcattatcagttttatttaataagcagttgttcctgataatcaaagtgattcagatatcacttaaggtcaccatgctcattaagtcaagagattatgtgctggagtccttacatgatgacctaaggcaggtctatccatgccttcaacagcatgtctacaaattcccaagcttgtctttctccaagtcacctctggctgtgatttctagtgaagatgaactctcatctctcattctttactctgttatcagtccaaacatgtaagagccctttctccttaatcacttaaccttaacccacatatcgaaaaaaaaaaaaaaagaaaaaaaagaaagaaaagccatgcacatagatcagatgaaagtaatacgctttccagaaaattcagggctcctctgtcatcacagacattgtaaatattagactgccccattctttttaaaatctaacttttttttttgggacagagtctcgctgtgtcacccaggctggagtgtagtggtgtgatcttggctcactgcaacttccacctcccaggttcaagcaattctcctgcttcagcctcccaagtagctgggactacaggtgtgtgccaccagagctggctaatttttgcatttttagtagacatggggtttcaccatgttgctcaggctggcctcaaactcctgacctcaagttatccacctgccccagcctcccaaagtgctgggattccaggcgtgagccaccgggctcagccctgccctattcttaacataccacttagccatttccaccaacttgatttcccaacctccagaaatgttgctttctcttcccactcccacttcatctctttgagatgtcattttttcctctttccccactagtgtctttagcagaaagggaagggtgctgtccagtagaaatatttctattttttttaaaacctaagtcaactcaagtcacaccttggttcaaaactttctgatgatatctctcgtcacattttacaataaaactcatggtcttccccatggctgaaagcagagtttctcaacctcggctctcttaacatttgaggccagatggttctttttggtggggtctgttctatgcattttgggatgtttagcagctctctggcctcaccagatgtcagtagcccatccccatttttacaatcaaaaatgtctccagacattgtcaaatgttccctgggggggaactgaaaatcactgacttaaaggccacatggactggccttgaactactgctgtaatttagctccttttattctctttgattgttctgctctggttaaaatggcctctctgctgtttgactgagaattatgttcctgtctgagagcctttgcacctgctctgccctgtgcctggtgcactcttccgtgaacatggcatcctggcacccagtcactattctgttgcaaacacccattcccacctgacgccaatacatttgcttattgaatgtctcccatgacctcctacaagctaagcttcatgggatggggacttggatggttttatatgttgccgtgtccccatgatgtagaagagtacatggcacatgctcaacaaagagctattgaaagaatgaggtaatgaataggcaggaacacacaggatggagtaagtagcacatatgtgagatgattaagaaatcagcccaagtagaatagaaggtatgtcctaaggttgggaaatgtagaaaactcccccacagtgggcaaatgatagaagttattgacatccagacagcgtactgtatccaccatctatcagacaagtgggtgtcagagcaggttcatgagctggggagagatgtggtaagaatggagcagaaatgagaagcctggattcaaccggaaaaccatgcaatagaagcgtggatccaactagaaaataacacaatgctctggtgtgagtgagggtggcgaattggtttcctctgtggttggtgaggagtactggagtgagtagattctaagggagaggtgatttgattgaacagtgtccatggtggaatgagaagtgtaagctggcccaggtaccaagggtttgtcatctctgttgtaaagaactaggtcaatggtggtaattagcaatgaaacagaaaatagaaaactgtaaatcacagacatcttggattttattcaagtttggcaagttgcatcttgtaccattatattttggaagcggctgagtgagtttttggtcatgtgttggcaagaatgacatcctgtcagccaggaagcatctttcccatgaaaaaaagggacattagtaaggctgccctacttagataaaaccttagataatgataaaagggaccttgggatagtggggcaatttagttgtatctctggttagttttctcttttttgtgttatgctaatcttaagtaaatttactttttatgtagttgcttaacgtgtttttacaagtgttactttacttgtagcaattcttgtgaaatacatggttggaacattaacaaaaaatttctattaaccaagccacaggaaaacataggagaatgaacaaaagaagccagccacaaagaggaccgatacctatttccatctatttaaaacaaaaatcaggtaaaacggatctatgctgttgtaagtcaggatcgtggtaacctgtgaggggtggggacaactggaaggagatacaagggagatctctggtgagctgttgatgttgtttcttaaccttggtgctgattaagtttctctataatgtataatacatagcagattggtaacctcaaaaatgctattgcctattcacaacgataggtgaaatatacactagtcattgattcacggaagttgactatattcagagagaatgtgttagacaggaaatacaaacaaacaaaaacaaccaaccaaacaaaaaaacaggtgccttagaatcttatggacgtagggttcaaatggcacctctgcttttttacttgagtgaggctggaaactttttatattctttctgaagcttggtttcctcacctgtaaaatgggaaaaaatgtgcacttttatgggagccaattggaagctctaaatagccaaagctagaagagttagagcaacacaacaaagtagtaagccataatccaaagtataaaatcaatattcatgagtccaaactgatataaataagtgattgaactaattaataagcgagggagaagagataaatctcctgtgcagaattccaaataatgtatagagctattccaccctaaagaaggaagagcataactccccactttctcttttcttttctttttttttttttgagagagagtccccctccgtcaccaggctagagtgcagtggcgcaatctcggctcactgcaagctccgcctcctgggttcaagcgattctcctgcctcagcctcctgaatagctgggactacaggcgcgcaccaacatgcccggctactttttgtatttttagtagagacggggtttcaccatgttggccaggatgctctcgatttcctgacctcgtgatccacccgcttcggcctcccaaagtgctgggattacaggcgtgagccaccgcgcccagcctaactccccagtttttaagtgtggcctgtgcacaacggcttcctttcaaagcgtacagcttgggaaggggaaaaagcaactgtgcagtggagaaaactgatgaacaccacttcaaccaggtcaacatcttccaggtcaacatcagcagcagtcttaagtcacatgggtgctatgtacccttaatgtgatgtgatgtgatgaaatggcattttacctctgtgatcttcttcccccaaacctataatcccagtctaatcaggagaaaagcatcagacaaattcaaatagagaggcgttctacaaaatccctgatgagcactccgtcaaactatcaattatgtcaactatgtcaggtctgagaacctgtcatagcccacaggagtctaagcagacaggatcactaaatgtaacacaatgtcctgaacaggatcctacagcagaaaaaggacattaggtaaaagtaacgcaatgtgaataaagtatagaatttagttaataataatgtatcaatattgggtcattaattgtagaagatgtaactacatcatactaatgtaagattgttgttgttgttaattktttttttttttttttgagatagggttttgctctgtcgcctaggctggagtgcagcagtatgagcatgctcactgcagcctcaacctcctgggctcaggtgattctcccacctcagcctcctgagtagctggggccaggggcgtatgccagcacacctggctaatttttaaattatttgtagaggcagggtctccctttgttacccaggctagtctcaaactcctgggctcaagcgattctcctgcctcagcctcccaaagttctggaattacaggtgtgagctaccgcacccagccataagatgttaataatagggaaactgtatgcgaagtatttgggaactctcggtactagctttctgatttttttgtaaatctaaatttgctctaaaaaataaaatctgtttttttaaaaaatgtgcatcttaccttaggttgcaagcataaagtgagataacatatataaacataaggctctcaaactttttggacttagtccccttacatgggcaaaagtcattagggctcacctaccccacccattcccacatcagctttgtgttggttcacatgtgccctaagggtaatgcgaattttcacggtgaccaggtcttagttgaatgctgaattacagtcatctgtacagttcagtttcctttgtgaatatagaatcgagaaacccttcctaagttatgttcctattaaaaaatgaaggtcatttaaaagaaaaaatctgatttttaggcactgtggacagatggcggggctcagggagggtgatgaatgggtccagggagcgagtacagggcaagaacatgaaactgtgagaaggtgatgggttgtgcctggactgtgatacttcttcatttactcaattgttcattctgtcattcggtaaatatttactacaggcgctcagtgggtgtggggtctggaacagtgaaccagacagcccaagagagtccgtactctgatggagatcacctagtttcttctctttcctgcctgtattattttccaatgagtgttcccttaaggaggaaactggagttctctataaaagtaaactatgacatattcctagaactttcctattaataacattcaccaatattgtaattatttatccaatgtgcatcttctctctagaccagggtttctcagccttggcactgttgatatttgaggatggatgttggctggcagatgttgagaagcatccctggcctcaatagtagtctgtgttgtgacaaccaaaaatgtttccagacattgccagatattccccaggggacaaaattgtctgtggttgagaatcgctttcctgcattggtggctctcaatcctggctgaagtttggaatctcctgaagagatctcagaaactgttgccagtggataccgacccctatccaggccaattaaatgggagtctctggggatgggcattgacttttttttagattgtagtgggattgaggagtgagaacctctttcctaatcagtatgcgtcatgaagccagggagtatttgtcttctgtgggtgggtgtttttaggacctaacacaatgatatctgaatgaatgagggaacaaaagaatgaagstgaagacaggtaggaagatgtgtcagaagttaaaagtggcaccgggacagtacaggaatgtgttttgcaaagagcaaacctgggtttcacggctgactctaccacattcccgttgtgtagctttgggcaagtgtttaatttcccgggcacttcagttgctcatcttaacacaggaatcacaagaatatgggagaattcttcataaaggttatgttccaagaaaaatgcatttgtttccattaaaaaaaattgacatgaaaaatctagctatttcccaaggcctcctcacccgacaactgttatccgttaagaatgctgagggcaaaggaggagggaggtcaagtatttgctcttcctggattaagagttgagcttttattttgacctcagggcagtcctaagtatgctagagttttgttgtatttctctaacattttattataccttaatctattttatggggaacaggcaatgtcaacatgagggtggcaatctgatggattgcctaagtcttaaamtaaagggtggggaaagtccacttcccactagtttcccacaggctttctaccagctaaacagctttgattcagatgacctttgtaagtgggaaactgtaggtcagggatctccaactcaaaaggctatggggtcagggtaggctgcattactgagggaagctggtgatgggaatgtgtgtgtgtgtgagagctcttgatcagtgaaccttgtttcttcaagtgcataccccatcagagggggagccccggaggtcctcagcctcagctgatgggtcccttgtgggaatgccgactcatctcctggttaatcaagagaaaccattgatctgggttttcaggtacaatctcccgattctgagtctttgttcaaatttttgcaaaattcattgtgtgggacaaatgaaatgcctattcagatcacatccttttactgatagatagcagatcttcaatttgtgtttgtccgttctaccataagaagtgagattccactatgagaaagggtcttggtgcctctgaagataccaaccccgtaagcacctccaccttaagctgctggtagttgaagacatcattggcaaagggagcactcggaggagctttaggggcaaggacgcataaagcagagctgtgatctttggctgattcatcgctgtggctagaaaagcagtgaggaccttctgagagaactgatctgaaaacctttttggttccagaaactggagggagccaatgaaaggagtagtgtagtgtcggttttttaaaaaaagtttccatttatgggccaggcgtggcgactcacacctgtaatcccagcactttggaagactgaggcaggtagatcatgagatcaggagttcaagaccagcctggccaagatggtgaaaccccgtctctattaaaaatacaaaaatgagctgggcatggtggcaggtgcatgtaatcccagctacttgggaggctgaggcaaagaattgcttgaacccaggaggcagaggatgcagtaagccaagattgtgccactgcactcaagcctgggtgacagagtgagactctgtcaaaaaaaaaaaaaaagttaccatttatttaataaacatctggagagcagtggctttgtgccagaccttgttccaattactttaatatatcaaattatttaatccttcgaacaactctatgacccaggtcctactgtcactccattttaaagatggggaaactggggcacagagaggttaagtgacagccaaagtcacacagctgttaagtgacagagctgggatttgaacccaggtctcccagctccagaatccaggttatcatcatttctcttggctgtattttaatagggacgattttatctatagtaatgaaaaattatggctttgaagactatgtagaaatatgtaaaaccagtctatataatagtaatttaaaaatcagctgtcaaattgtatgtgtgctataactgttaaagaacgatatgtaggaaaaaagactagaagaaaaagaacatgaacattatgagagttatgcaatatggtgagattatggagaataccttcttttattgatctcagtattgactgtgagcttttatttcttgtatgatgttttattaatgactaaaaaacatttacaggtttgtaaatttatcccccatcttccttctttctgaatgtagcttccaaaggacagtgcttgtgttccagggcacatgcatcccagcactcagtcctgtatttacagggtggatgcgttttattcaagaggcctggcctgaagaactcccaaacacgcgttattcacaacgtgcccaatttaagacttgaaccaacaaatgatggggtgtttccgttcaccagctaatatggtgcccccatgtggcagtagcataaatacactttgcaactacattacacaattcctaataccctcaaattcaaggtgattcacattatttcccttttgcacataaactgagtctttattaacatttttagaattaactgctatttcaaattcactccaatcttgtacaaatgggtctgtagtagtcattgcctgttccaagttgatgggtttccaggctgctagagacagaatgatcccaaatgacatagtttaacaccaacctcagcattttctctgccctgttgagcacttactatgagtcaggtgccctcagcactagtgacaaaggaccctctctcagtttgtaaggcacaaatattctagtgccctcttcaatgcttattcatccaacatgtgctttttattgagcatccactatgggctaagccttgtgctttggaggatttgaatattttataccccagttgtttatatcctaatctgtgcctggctccaaactacctctgctgtgtcttagctgaatgacttaatccttctgtgcctcagtttcctcctctgtaaatgggtgatggtaacattacttaccccccagggtgattgagaggattcagtgagtaaatgcatgtgaactagctggaacttggtaaacatgcaatccatacttggtgtgcttattttcaaacaccactgttgggtaactcttatgaaacacttccaacttctcacgaaagccctggctttgttgccaggtttccggagtatacaattattttcccctctcctcaaggagtgattccttagccacagactttttcaaggccctctgacccctgagctgcctcaggacttcatagacaccaggcctagcacagcctgatctctaacatcataagtcagaaatgacgtcacggttacagccacgatactgatgacagccattcacaacacgctgggccagtgcgaaatcctgtcttgctgactgcccatgccagtctaggagggggtgttatgataatcctaccttccatgtgaggaagtggaggttccacatggttatatgtgactttcccaaggcttgtaagtggaagagaagaatcaggcagtctgagtcttaaccaagatgytcagctgacagtcagtagaggcaaactctacatttaccaatattgtgagtggaaacatctgaaaattaaaataaagacacagttttattttttaaaaagactgatgtagtaattgtttggaataggctctattaggcatttcacaaatattaactgacacaggtaccattatttagcccattttacaggtaaggaagcagaggcagagagtaattagaaaggctctctagggttacacaggcaggaatagcagggctagactcgcacccattygcctatgccacactgcctcatgggtaaacacaagcagatggtctcccgtgatctttggcttcattaatttactgccaaacaaaaaaaaacctcagatttagttaggagagactttattcaaaaggattattgcagtagagggaatgttctgaccacttaatctgcaagtgtctcaagatgaggcagtaaatattttgctttgctaaagaggcataaacaaggttagaaagaagtgggtgttgggggctgggatgatcagagtgacacaatcagacagtggttgagggctgatcaggaaggtctgtaaagaggagttgtctgctggctcaggctgagggtgggccaggacctggggaaaggagagactctacaccaaagttaggttaacgaacactttgttccgactgaccagtggaaacaggcagttaaactaaccacaaaaacaaagaaagggagtttggaggctctgggtctggccttgtcataggtaaacaagtgggggcacctatgagtctcatctaagtcatatggggaagggagttctttgcagtgagctgtttcccagaacacaaaagggtggggacatttcttaacctttgcaattttccagtatcacagggcttgcctaaagttcaacactgttgtcacctgtaggctcttccaaggaactttcctaagagagtcagatcctaggctcatgaagctgctcaaaggcactgccttccaaaatgtgacaaattatcctctactcaaaggaaaaggagtcaagatcacaatgtctcctccttgctcgcatccctttacctgccacgctggcttctttcactcagtgtaatggtttcaatgttcatgctgtagcaagcatagaaacttcattcctttctatggcttaataatatctcactgttgggtataccatattttttatccattcattagttgatggatgtttggttagtttctttttttctgttgttatgaataatgctgctatgaacatttgtgcacaggtttttgtgtaaatatatattttcatttatcttgggtacacacctaggagcagaattgctaggtcgtctggtgacattatgtttaaccttttgaggactgttttccaaagcaaagataactagttttagtgtctgcagtaagtgaaaaagatgttcaggaaagacactaaaactaactcgagaaagaagagggattattaggaggatgtggaatttcttaaagcatacatggggaagagagcacttgaggtttaccagagagtggaaagctatcatgagccaagaagatgctcgtctatgtctgtggacaacatctgacctcagactctgctcttatttgtagctttgcctcttgttactcttcaagaggacttagcccatatctccatgtgcatgaaggaagacagccacccagtccccccatttgctattgagtttaatgacctctttggtcagacagtatcggacactgctttggatcttgcagccacaattccacatttctgaaagagaaaagctggttgactctggtccaatcagccccagacaagaggtggagttacacaggacaattataaccttgtggacccctgtggggaaggggaagctgggaagctctcagcatcttgtgtggaggcacacagtgttgaacacatcaaagtgtttgtgggatgcaaggccaaaggaaggattggaaagtgcaaagttcatgattctcaggtggatttggggagcagatgatggacttcaggtttggatacaggtgacagtttgcatgccttcatggtcagcagctctaagtgggtggatgacccctttccccctctcttagctctctagagagcagcagataccctgattgactgtttatgtgctccgtagagtcaaggtcatggtgtttgtctctgcactgcagaacagttttcttctctgtgcagaaggaacatgctgggcatcctgatatcacacaagcctctagggggaactgggggctttaaaatccatggcccccatatatctagctgtgccaataataaggcagaagcataaggtatggtacctcacaaaatgggaaaggctgtccacgaaacacttggtctcacccagcagggtgtgtataaccaggctctagatacttttaactccaacctggttcaaagttagttattttcaggttaattcataccctttcttacagaccacaagaggatcatcctgggattagcttgcccaaacctcccttctctgctgacacagatgaaggagaaggtggctggtccagtacgacagtgactcatgaacttggatttaggatccaatagagtccaggtcgatccctaccatctgtgtgatcttggcatctcttgttttcagtttcctcatctgtaagataggaaggataatttctactgtagacatttggggaataattttataagacagacttgaccactactggtatttaggggattccagggagagcacacacagcactggtctgcagtctggtgaacttgccagtgtccagcatctggcctcagcactgtggatccagaagttggatttgtccagcaacaggtccatttcttcaggaactgggctcacaaaatggttatacacatatattatatattagtaccagaattctaatgcattaatttacactaagacaggtgtctatcacatggtccagacacttgcatgtgtttcagttggtaccatctcctcctctggccagccccagggaggaaaccacttacactcaagagctatttgctgggcaatgacatacatggagacataagaaggaaggagatggagcaaacgttaaatgcaatcagtgatggcaaccagaggcgttcatctcataatggtggtgtcagaaggacaggagtacacacaccttttgccatgactatcattctctctctggcagtgttcgcacatgccaaccatgctaggatctctctctcttccacctttttctacacttagaggactgaccagtctccattctaattagcatagcctttaaaaaaagaaattacagaagaaaaataagtacttttttgtagcaaaaatggtaaacattacaagataaggtccaccctccattctgcctgtcctcctaaggaaaacttagggaatctctccttccaaattcttttttattttattttatttttttacatttccacacctcgctatttatggcatcaactctccttcttttttgcattaaaattggattttattaattattattatactgcaaattattttatttcacttaacaaagcatcttggagcaatagccatgtcattgtcaatagttctattccatctttaaaactgctttgtcttattccattttgtgtaccgtaatttaggtacccattctcctattcatagacatttaagttaattccttcttttgcttttatacagtgttgtaaagaacatcatttatgtgcctgcaagtatttctctaggataaatactgagactttttgggtcaaaagataggccaattcacactggtggattttagtcctgcacatgtttatcaatagtgtatgtgaacacctgccctctctttgcagacagtagatttcaggcccctgttgttagcttggaagcgagatctctttcctgcccactcacatactgatctttgagttgattctctgcatgtactctgattttccttatttcccaattcttggcgggcatgtctgactaccaacaagagatccctgcaggagtccaaggaagatcacatgacacaggcaatgtgaaatactttcttattaaaacaagagagacgttaactgttatatgtttattatggtgtatgtagctcaaagggtgatttaatgttcatgttatcttcaacttaggaatttcagacatcaacgttttgcacttgtgggtataaaacactttttcctgggtccctaataccctcttggctgggttgggtatactcccatctcaaattctgagaagcttaagtcatactttgtgtattacattagtctctgttttcacagagcaatgcaattagggctttctatctggtttctgttgtaactttctttttaggcttgacgtctattccatggctcagggcagaccatggatagggaaaaaggcccaggagggtgagaaacacaggtggccatgaactttttataatccagcatgaactggcccccatgggcagcctctgttattgccctgtgtctccaaaaggcaaaaccgagtccaaagtatgagtttgtaatgaatgtttgactgaaggttttacagagtgagtgaagttacatcaaacactacacattatagattactgaagctacttccattggatgccttggttttccttcccaattactttggccaccagccactcctggactacccttcccccatgcctttctctttccacctatgcccactcacaacccctaattctatattatgcccctttctttatatggggaaatgtatctgtctggcttggcttctcctcccacctctccacttagaacataaagaaacttcctcaggaacccctctcttcagagagcatggagaatcgtaaacaacgtaatatgttttccttgttaaatattttctcckgtcactctggtttgacctcactccctactcccctgaccctatgcaggtggtgattgcgggcttggccatgctttgtgcaagtatctggatgagctgggyttcacggtatttgccggagttttgaatgaaaatggcccaggagctgaggaattgcgaagaacctgctctccrcgcctctcggtgctccaaatggacatcacgaagccagtgcagataaaagatgcttacagcaaggttgcagcaatgctgcaggacagaggtactgccgccagcaccctcagtgcctttaccctcctcctgaatgcccagctcttgttccggcttaggctgaacatgcccccccactccactctgggcactgtttgccctgaagcacacctgtgctgaacccctaccatgtgtgggggcctctatcaacatgaagaccttcggagtaactcagacatgggcccatccacacagaacttacagaaacctcagtctcattctctccaacttctcagtcactctcccatgaataattcctccagccccagctcattgcttttctgtccgcaatagcaacatgcattagagtctccagcttcgaaaaaaaataccttcatggtcactgtccttctttacccattacccttcctcttctctttccttcatggctacgctccacggaaccctgtagctctgtgattctcttcctcaccttcaatttgccgttggctctcactctgcctccctaactgatctggcaaagctaatcagaattagcctgaagacccaggttttttttgttttcaacttttattttaaattctgggttacacgtgcaggatgtgctggtttgtgacataggtaagcatgtgccatggtggtttgctgcacagatccagccatcctgtaagtactgagcccaggattcattagctattattcctgatgctctacctcccctccctccaccaggcccaagtgtgggttgttccccaccatgcgtccatgtgttctcactgttcagcccccacttataagtgagaacgtgtggtgtttggttttctgttcctgctttagtttgctgaggataatggcttccagctccacccatgtccctgcaaaggatatgatctcattctttttaatggctgcatagtattccatggtgtatatgtaccacattttctttatccagtctatcattgatgggcatttgggttgattccatgtctttgcttttgtgactagggctgcaacgaatctatgtgtgaatgtatctttgtaatagaatggtttatattcctttggatgtatacccggtaatgggattgctggaagacccagtttttaacttccctgcagtatttaagcatgttgtttatactctcctccttggctttggggtccccagcccccattgctctcctagctctccaatctttctttccacttctcctggatgaaactttgcctctgtctccccacaaatacaaatgcttctgagggttgcatctgcagacttcgcactctatgtgccctgggccatgcagttttctccgtataccaagagttctcaatccaactgcacattagaatcatttgaaaattacctatgctggggtccaggatgggctatgtaactaacttggcagacccaatgcaaaatgaaaacatggggcccctagcttgatttcggaagattattaggaatgttagttggtgacagcagagactgaaaccacgtgcaggacccttctgaagcaccaggccctgtgtgactgaacagatcccccagacccaattaaatcagtctctaggacgggatcccaggcatcattagtttataaagctcccaatgtgatgctaatgttagcgcagggccaagaaacactggtttacgccaataactcccaaatctattactatattgccaacctaatccttcttctccacgtatacaaagttatctatcagacatcttcccttatactccagaggcttcaacttcaacatgtcaaatgttgttttttttccccctgctgccattctgcaaatcggtttgctctcctgcatcccacagctcagacactggctctaccacctaaccagtcattcaagccagcaacctgcgggtcactgagaccctcagcttatcctcagtgcctgtatcctactgatccaagtcctgtcaattccacctcctggatagttaccctccagccccttcctaccactgcatagcactacgacttagcacagaccctcaccttcttccacctcggctatcccaatgccctccttgcaacccatctttccttccccattactttccagagactcatcttcacagcattcacattctacagtgcsatccatctcctaaaaacctttagacatrcagagcctccacgtgttggggtccgcccatgtggcatgcccgtgatggggaatttatcagtggtttgttggttccctatcagtggttccctatctaagcaccttaacaaggactagaggtcctttcaggataatggctcctgccaaacccttaatttgcaatacctgctggttcacttagtaaattctgaagagtttctggaacagaatattctactttacatctctgcacatctagcttcctgttacaggaattcccctcccactcccactccctttccctaaggctcttgcctttgtccagtggcagactctaatcccccaggagacctggctcacacgtaacacctcttgcatggtcttccaggtattgcaggttgtgttattcacttcctcttccagacactcactcattatggttttctgtctccaggactgtgggctgtgatcaacaatgctggggtgcttggctttccaactgatggggagcttcttcttatgactgactacaaacaatgcatggccgtgaacttctttggaactgtggaggtcacaaagacgtttttgcctcttcttagaaaatccaaagggaggctggtgaatgtcagcagcatgggaggtgagtcagcattttcacacatggtcatggggtgcccatcacaagacatggctcatggcattctatgtgggcgaacaaaaatgcagggcatgcaaaggcagggttgggtcaggattagtcaaattgtatataccctgttggtcttatcacaataaaacctttctcttctttcaaattctttcatgtagaaactcttatctgccttctaactcatccatttgttactggggatttagggttcttatatgtctttataatgtgactgccaacacacatggttggtagatttgtacaggaaatctcacattacaaataatgtcagcatttcaggcaacctgttttcaacacttcgtcaatttaacacactgtgttcagttccctgtaagctgagtaggcaataccttccctctgtttgtgccatcaaacaaaagctgcctgctattgttaacccgaagattgtccccartgttgagcagcctcaatccagctaggtcaggatgtgatgacactggatagtttgtctctctctgtttccaagaacaaatagtacacaacttgagtcaagggctgaacagtcttgccttttcataaaaaatgcccatgcgtgtcatagcatgccctcttttctgggacagacattttcaaactggggttccttgggctcttgttcagtttagggaagatccatcgacctgacttttgggtcactgggtcactgcagaggtgagagggaagccaaagggatgggctctggatcctaggatcctgccttcaaatagaggagtaccactcttcactgttggatcaattaattctaagtaaaatttcttaaaataaakggtatgactatgctgtttttgtttgtttgcttgacttttgtgttttgtgctttttttggtaatgtgaatatcagttctagaatgatttggtcagggagggggttcttcgcatttcctagacaaatatagttgtccatcacattccctttcctggctttaactcagtaactttcttaaaactaactgctatgtgtctttgactagagtcttggttggcctgaggcataaacaaagaagaaggtagggagagagagagagagagaaagagttgggggagacgaagtgtcctctaggatggttaggagcaatgagtattatattttagctgtgtgagaaccctaaagtagttccaatttcctgctaccttgccaaagcaaatgaatcctgagaaaacacacagcaatattttcctaatctttgttctgaacttagcctttacaattttggcctgtgtggaagcctcacctttctcatttccctggaatagtctggtacttctgggaacgtctcacagactctttgcctcacttatataataaatatttactgaaataacagagtactgcctcctccttggcacactgacaaggaggtttctcttttttttcctctgttctcaactttgagcaacaccttcactcatatgagttcactttagttattgccaaaatgtgcagtatgtgctgtaggcccagtgtctggcatgcaccagcagctcagttaatcartgaagaaatgcaagtgtatgaacgagtgaaaaatggaaaatggattaatgaatgggtaagtgaaaagcttacagtacaaggccaggtgcggtggctcaaggatgtaactccagcactttggaaggccaaggcaggaggattacttcagcccaggagtttgataccagcctgggcaacatagtgagacctcgtctgtacaaaaaaattaagaaaaaaacaaacaaaccaggcattgtggcatgtgcctgtagtcccagctactcaggaggctgaggtgaatctgttgagcctgggaggttaagactgcagtaagctgtgttcatgtcactgtactctagcctgggtgagagagtgagacgctctctcaaaaaataactcacaatacagagcataaccttccacatatcttcaacttggcctttaaagctctttccaagccagaacttcttactctgttgtcatgtattttcattgaagggaaactctgaatgttaaaataaataacatatctcactcttttattattattattattaatttttttttttgagatggagtctcactctgtcgcccaggctggagtgcagtggcgcgatctcggctcactgcaagctccgcctcccgggttcacgccattctcctgcctcagcctccctagtagctgggactacagacgcccccaccacacctagctaatttttttgtatttttagtatagacggggtttcaccgtgttagccaggaagatctcgatctcccgacctcgtgatctgcccgcctcagccccccaaagttctgggcatatctcactcttattctcaccctctggttgtgcaaattcattacacccagctatgtccatctattttcttaagatcatcaccaagttaacccatctgaaacaaaacttgctgtcagccctccagaatgcctaggaatacagctaactagggaggtgaaagatctccacaaggaagactacaaaacactgctcaaagaaattggagatgacacaaacaaatggaaaaaatctcatgttcatggataagaagaatcaatatagttaaaatggccactctgcccaaagcaatttatagattcratgctattcctattaaactaccattgaggttcttcacagaactagaaaaaaagatttaaaaattaatatggaaccaaaaaagaacatgaatagtcaaggcaccactaatcaaaaagaacaaagctggaggcatcacactacctgaattcaaactatactacagggctacctgtaagcaaaacagcatggtcctgtacaaaagcagatacaaaggtcaatggaacagaacagagaacccagaaataaaacaatacacctacaacatctaatctttgacaaacctgaaaaaaacaagcaaygggggtaaggattccctattcaataaacgatgctggggtaactggctagccatasgcagaacattgtaactggaccctgacttctttctgccctagtcttttgagtttcagatctttgagtcatcttggatttgtttttccccatgcctctctcttctttctcccacccactcaccaagatgtatgaagttttcgttcatcacatccagttttgaatcttcatgtcctggagaaactctagaaatgagtttatttgtaggactcagaaaccacccaaggtactttataaagctactaaaacagtaacaagaaatcaagtamcaatatcagaagagatgggaggcatatgtactcaacagggccgggagtttgtgtaaagacagaaacaaagcgctgtcaagataggaaaaagatatttcatgcaaatgggaaccaaaaagatcaggagtagctatacttacatcaggcaaaatagatttcaagatcaaaaccgtaaaaagagacaaagaaggtcattatatagtcataaaggtgttcattcagcatgaggatataaccattgtaaatatacatgcacccaacaccagagcacccagatgtataaaggaaatattattagaactaaacagagagatagacctcaatacattagtagctggaggcttcaatactccactttcagctttggatagatcatccaggcagaaaatcaataaagaaacatcaaacttaatctgcactatagaccaaatggacctaattgttatttacagaacacttcatccaaaggctgcagaatatgcattcttctcctgagcacatggatcgttctcaaggatagaccatatgttaggccacaaaacaagtcttaaaacattttaaaaaatgaaataatatcaagtatcttctctgaccacaatggaccaaaactagaaataaaagataagaggaattttggaaactatataagcacatggaaattaaacaatatattcctgagtgaccagtaggtcaatgaaaaaaattaagaaggaaatttaaaaatttctcaaatgataaaggaaatcaaacataccaaaacccatgggatgtggtgaaagtagtactaagagggaagctggctaccggctataagtgcctacattaaaaaagtagaaacacttcaagtaaaaaacctagtgatgcatctcaaaaaactagaaaagcaagagcaaaccaacctcaaaattagtagaagaaaagaaatcataaatattagagcagaaataaataaaattgaaaagaagaagacaatacaaaagatcarcaaaatgaaaagttggtttctggaaaagataaacaaaattgacaaacttttaatgagactaagaacaagactaagaacaagactaagaacaagagagaagacccaataaaaatcagagatgacaaaggagacattacaaccaataccacagaaactcaaaagatcattagaggctactatgagtaactaagtatataccaataaattggagaacctagaagagatggataaattcttacagagagcctaccaagattgaaccatgaaggaatccataacctgaayggatcaataacaagtaacgagttcgaagcagtagtaaaaagtctgcaagcaaagaaaaggctgggacctcatggcttcactgctgaattttaccaaacttttaaagaagaactaataccgattgtactcgagtattctgaaaaataatggtggagggaatacttccaaactcatcctatgagscctatatcattctgatagcaaaaccagaaaatacatgttaaaaaaaaaaaaaaaaagaaaagaaaactacaggccaatatacctcatgaacgttgatgtaaaaatccttaacaaaatactagtaaactgaattcaacagcgcattaaaaagatcatttatcatgactaagtgggatttatcctatggatgcagggattgttcaacatttacacaaatcaatcagtgtgatacataatctcaacagaatgaaggacaaaaccatatgatcatttcaattgattctaagaaaagcatctgataaaattcaacatccctttatgataaaaaccctcaattaaaaaaaaactgtgtatagaaggaacacatctcaacgtaacaaaagccatatacaatagacctatagctactgtcatgctgaatgggaacaaactgaaatcctttcctctaagatctagaacacgacaaggatgcccactttcaccactgttattccacataatactggaaatcctggctagtgcaagcagacaaaagaaagaaataaagaacattcaagctggaaaggaagaagttgaattatccttgtttgcagatgatatgatcttatatttrgaataaactaaagactccatcaaaaacaattaaaactgataaacaaattcagtcaagttgcaggatacgaaatcaacatacaaaaatcagtagcatgtacttctttttattttagacagagtctcgctctgttgccaggctggagtgcagtggcgtgatctcggctcactgcagtctccacctcctggattyaggtgattcttctgcctcagcatcccgagtagctgggactacaggtgtgcgccaccatgcccagctatttttttgtgtgtgtttttagtagagacagggtttcataatgttggccaggatggtttcgatctcttgactttgtgatttgcctgcctcagcctcccaaaaggctgggattacaggcattagtatgccaatagcaaacaatcagaaagagaagtcaagaaagtaatctcatttacaatagctacaaataaaatgaaatacctgggaattaacctaaccagagaagtgaaagatctctacaatgaaaattatataatattgatgaaagaaattgaagaggacacaaaagattgaaagatattccatgtccataggttggaaaaatcaatattgttaaaacgtccatactattcaaggaaatctatagattcaatgcaatccatatccaaataccaatgacattcttcacmgaaatagaaaaagaaatcctgaaatttatatggaaccacaaaagactcagaagagccaaagatatcctgagcagaaagaacaaaactggaggaatcacattacctgacttcagattatactacagagccgtagtaaccaaaacagcatggtaccagcatgaaaacagacatatagaccaacagaacaggatagagaacccagaaataaatctacacatctatggtgaactcattttcaacaaatgcaataacatacaccagggaaaggacagtctattcaataaatggtgctgagaaaactcagccaggtgctgtggctcatgcctgtaatcccagcacacagggaggtcaggtggattgcttgagtccaggagttcaaaaccagcctgggcaacatggcaaaaccatgtctctacaaaaaatacaaaaaattagccaggcatggtggcatgtgcctgtagtcctagctactcaggaggctgaagtgggtggatcacttgagctcagggagatagaggctgcagmagactgtgatcacaccattgcactccagcctggatgacagagtgagaccctgtttcaaaagaaagaaagaaagaagaaagaaagaaaagaaagaaagaaaggaaggaaggaagaaaggaagaaaagaaaagaaaagaaaagaaagaaaaaacaaactggataccatatgcagaaggatgaaactagatccctgtctcttaccatataaaaaaatcaaatcaaaatggattcgatacttaaatctaagacctcaaactgtgaaactattgtactataagaaaacattagggaaactctccaggacactggaattggcaaagatttcttgagtaacacccaacaagcacaggcaaatgagatcacatcaagttaaaaagcttctgcacagtgaaagatacaatcaacaaagtgaagagacaacccacagaatgggagaaaatatctgcaaactagccatttgacaaagacttaataaccagaaaatataaggagctcaaacaactctacaggaaaaaatcaaataatctcatttaaaatgtacaaaagatctgaataggcatttctcaaaagaagataagacatacaaatagcaaacaagcatatgaaaatgtgctcaatatcattgatcatcagagaaatgcaaatcaaaactacagtgagatatgatctcaccccaggtaaaatggctttcatccaaaagtcaggcaataacaaatcctggtaaggatgtggagaaagagaacccttgtacactgttcatggggatgtaaattagtacaattgctatggagaatagctctaaaaatagagccaccatattatccagcaattccaccgctagatatgtacccaaaagaagggaaatcagtatatcaaagagatatctgcagtcctatgtgtgttgcagcactgttcactatagccaagatttggaagtaacctaagtgtccatcaacagatgagtggataaagaaaatgtggtacatatacacacaatggagtactattcagccatgtaaaagaatgagatattgtcatctgcaataacatggatggaactggaagtcattatgttaagtgaaataacataatgagcataaagacaaacttcacatgttctcacttatttgtgggagctaaaaattaaaacaattgaactcatggagatagagtagaaggatggttaccagaggctgggaagagtagtggagaggactaaggagggggaagtaggaatggttaatgggtacaaaaaatagaacgaatgaataagatgtactatttgatagcacaacagagtgacaatagtcaataataatttaattgtgcatttaaaaataactaaaagagcataaatggattgtgtgcaacacaaaggataaatgcttaaggtgatggagactccatttgccctgatgtgattattatgtattgcatgcttgtatcaaaacacctcatgtagcacataaatatatacaccaactatgttcccacaaaatattaaacattaaaaaaaaagaaacaaagctctgaaatgatcgattttcctctgtgttagtttgctagggctaccataagaaaataccacagacaaggtgtcttcagaaaacagaaattccttttctcacagttgtggaggctggaagtcgaagaccaaggtgtcggcagggttggtttctcctgagctctctctcctcggctttcagatgactacctttttgctgtgtcctcacatggtcatctctctgtctgttgcacccctggtgtctcttcctcttcttataagaatggcagtcatactgaattagggcaccactcttatgatcccgtttaaccctaatcatctttttaaaggttctatcttcaaatgcagtcacgttccaagatactggaggttagtactgccacatayaaacttttctgggtggtggggggagcaattcagtccataacactgtaattgataagggacaggggaattcagcagagaacacagtgaggggctctctagcacttactggagagttttgtgaaacaatagaaaagattttgagccggaaaagaaaaagctagaatgtaacacaaggattagaaaagtcaaagtatgtgtaaaaggcaatatataaccaacaaatccacagaaattaacatccaatgtgatgmtgacttgttgatatatctttggcaaaatyaatgtaatagtaactttggaaacatgcttatctgggagttyattgctgttattttcattttgaagcaaggtgcatggagggagagaagcagtcagtcactaataagggctccagaagaagcacgtggttgccctgacccaccagattgtcttgagtctggcacctctgtcaccttctgagtgacaagaattttggtggcatagatttatcatggaactttgcaccagccaggaaaaactgagctggaattgatgactctgttccagttattcaytgctgcagagtaaataaccctgaagaaactatctcaggctgttgtgagtaggcagctggtctgggaggcagaataatgggtccccagaaacatacacgtcccattgtctgcaacctgtgagcctgttacctcacgtggcaaatggtactgtgcacatgtgattgagtgaaggatcttgagatgaggaggttatcctggatattctggatgaatctgatgcaatcacaagggtccttataagaaagaggcatgagggtcagagtcagagagaaactggaagatggtacctaggtggctttgaagatagaggaaggggccagaaaccaaggaatgcaggtggcttctagaagctggaaaagtcaagggaactagttctcccctagagcctccagaaggagcatgaccctgctgactccttgattttatcataagataataaatttgtaatgtttaagccactaggtttgtagtaatttgttacagcagctgtgggaaaataatgtgtctggtttgactttaaacgagctccaatttataacaaatcacatgcacctaattaccgattccaaacatttttcttttttctcctcaaatttaaacttcattcctcccaatctcatgtaattcaggtctccatgaacactttctcctcattctttacaccatgttgaaggaacgcttagcactttatcgcattccaaaaaggcagagtcaatcaaacagattttactagagattccatatatcacaaagcactatttaatgcaaattcccttcagatttttgtggttgttgttgtttttgttttttttgtttttcctccttccgaaggtcttcagttgccagccacctcacctctggttacttccccctccctgtcctttctggctcccaaatctccctggtttctttcctcatctttccctctccttccttctcccataaccagcacgttcatatcacatccatctactcttagctgctcaataaactaarcacttccattggatctgccctccttggaaggcaagaggtgtgcagaatagaagaaaaaattattgcaaattgtgtttgctgtttatttgtctgcyctattccctccctctctgaaactctcagaagcaaactgaagctgttcccgcatgaacttccctaaattctcctctctccttctgttgtcactcattctcctcttcaacctttcctccttcctcctccccactaactccttctctctccctgggcctttcattctaccccaggctatgctctaaggatgattcctccccagactctcaatacttttctctttgatctgggctggcagccaggagggtggggctctcctcttcactgcctggttgggtgacactcctggaaaacccgaggtcctatagcctctctaagctccacttttgtccctgtaaagtggaggcaataagagtggacaaataagcagaggaaatatgaccacataggagcgttctgaggcttaaataaaataattctcacaaagttcttagcatagctgcttatgtgtagtatgtcttccctgaaggttatgagttattactatttttattaatggacactgccccgcacttctttatttttaaaattaattttagcttttattttaagttctggggtacatgtgtgttccattgcagcactattcacaatagcaaagacacagaatcaacccaattgcccatcgatgatagattagataaagaaaatgtggtacatatgcagcatggaatactacacaggcataaaaaggaatgagatcatatyctttgcagggacacggatggagctggaagccattatcctcagcaacctaacgcaggaacagaaaaccaaataccacatgtcctcacttgtaagtgggagctgaacaataagagcttctttacccctttttccctgagctccttcaaaagttaggtgacttgcagcctctacttcttggcaacctcattaayccattaaagtttggctcctttgttttccgttaaagactgctcagttccctgtgcccactggccacttcttatcctccttgctgtctctatcaggcagaatttccacaccttctcctgaccttctatctgcttgtccagcctcagtgagaagttccatgtgcctctcatttgggcagaggtagccagagttggaatgtacacattgcttaaaaggatgtttgcctgaaagttcaaactcccaaaatgtcctcttcaataggtttctttgcagctttttgaatatgcatatgaatataaccacattttaaaaatccattcatcagttgatggacatttaggttctttccaacttttgactattatgaataatgcttctctgaatattttttgtacaagcttttgtgtggacactataaattttatgtaagtgttagctattatttctatcactttctgtgtccttgggaaagtcacttaaaccctatacactttagtgttttcatttttaaaaatgaggttcctgaggataatactagaatctacctcctatgacagttgtgaccattaaatacattcagagctgatgttaaaacgctcagaacagtgcttggcatatagtagacacctaataaacattaagagttattatgaaggatccattacatttcaggcatttgttgaatgctctcaggtatatgaccccaataacctatgtaatgttgctattctcatttttcagttataaaaaccaaggtcagaagggttcagtgactggcctgtaagctagaacttgaacttgaactttagtttcatgttctgactcaccaagccacctccttccctggtgactcagtgtaaacatatgttaccaccacatcaaacactaagtcaaagggtctcagatgctcttcccagtggtaccttattgaccattttttgctttctactagctccactgttagatgcttgttccagcccaactcccattcttgtgtggaaataaagtcaacataacccatgtcttctaaatacactccyacgggtgggaagttccaggagtgggatggggagaaacattacttctttaagttcttctctaagaaatgcaatctagagtcaaccatgtccttccctccggtgtccttccctcctacatcttccatccctaaagaaaggaacatgaaagggaaagagtaaaagacatcatgtaggaatacaggtaagaatcttctaggatgccaggcaagcagaatgaagacagactgcccgggttttaatccggtctctaccaatgacaactgcgtgaccttgggaacagttctgaacctctgagttgcagcctcctcattataagataaggataatagtaattgcttcttctggggtccatggagagatgagatgaaataacacatgtttaagcatcagtcttgtgcttggcatgcagtgaatggtccagtagcattagcgacccaaaaaccatcccaccatgaggatctggggcagcagctgacagtctgtatgcttgcagcttcttaatctgccagctgctggtatcaccacctctgactgtgacaccgaattacccttcatcctctgccccgtcacttactagctcctgaggagatgaccccaacaggtaactccttccagatttgaccatgtctactacaggagacttttccccattgtaataacatgttgattatccctcccacataaatagcatagctctttaacccaaatcccagcaaggcagttggataaatatttaaccaagtatcagaggcatgggaggcaactctgatggtacaaagagcagttggaaaatctttctctttgaggcctaaagtcgccagttttgctcttcagaaatgttcrcataaacacttgtgtgcaattgcatgctatgctcaaaaacaagccctgctaaaatgacccaggcctcagagattttgtgtcattgtggcttaaatcttgctcttcggttactagctgggtgacctgggtcaggtcaccttacttgtcatgtctctatcttcaaatgagggtcatgtagcacctgagtccagggcaatatttctcaaccttggcactactggcattttggtggggagaattctttctgtaagggcactgtcctgtgcattacggggtgtttaacagcatatgtgtccttgacccactagataatagtagcacccacccctaattgtgacacgtcttcagatatttcccatgatctttggggtgcaaaatcacccccagttgaaaacctctgatcttggctgcagatttaaatgaaccatgggttttgagtgcttagcamagttactggtatataggaaatatccaagtaaaagggacctctcaacggagagagagtaatcacagttgcctgccacatcaaactgttctttttattattattttttttatttttttacctagaattagaggaagtggaaaacaattctaattgtacaaaggacagttggaaaattgttctgtttgaggcccaaaacctttctcgggccagttttcctycagaaatcgcagagtaaacacctgtgtataattgcatgctatgcttgaataagaagagttgaagataaacscctctaaaacaggtctccctctgktgcccaggttggagtgcagtggcacgatagtagctctctataaccttgaactcttgggctcaagcsatcctcccacttcagtctcctgagtagctgggaatacaggcacatgccatcacatctgctaatttatttttgccatggggtctcactttsttgcctaggacggtcttgaactcctggcctcaaacaatcctcttgtcttggcctcccaatgtattgggatcataggcatgagctactgaggccgtcccaagctatttaaaatacttcagaattactttataccaaagcaagcaatcttagagattcttacaagtctacaaattaaaagatctagaagagttcacagtttcagccttgagttctgtctcagtccagactgtgggatcattcytggacttttccttgctgagccagctgccttaaaagaatcatttggcaagtcattcagccagtctctcagctgctcagtggcaagatgggaagcctaggctgagattttcttccctgacactctttagggagattgtgggacaagggggaaagtgggtagagcaagactgagtgaacctcctcatgctgggttgtgtgagagatttacatgcctatagtcaattcattctaacatccacagaatgcagatattaattaattttctagatcaagcactctgtaacccaagtttgtgtaactggtaagtgataaagtcaggatatgaaccrggatctgttttactccaagtactatgtgctttctacttttccaggctgttaagcaagaacatgtcagacaaggaggggcataaaaaaaaaaaccctaactctgktctgtttaaatggtaatcaggaagtgttggcaatttagggctgtctcttactccattgcttctcaacactgacatatgtgggtatcacttggagatcttgctaaaaggcagaatctgactgggttggtctgggtggagcctaagattctgcatgtctataactagttcctgagtgatgttggcggtactaayccccggaccacattttcaagcttgagatgcatcagaatcaccggagggcttctaaatacacaattgctagaaatcaaaacctcaataagataacataccccctaaaatggccgtaatgaaaaaccaccataatataatatacaccctaagatggctataataaaaaaaaaacacacagaaaaaacacatgttggtgagaatgtggagaaattggaaccctcttatactactggtagaaatataaaatggttcagcagatgtggaaaacatttgrcagttccccagtaagttaaacttagaattactgtgtgacctagcaattctactcctgggtgtatatgtaagagatagaaaagaggtgttcaaacaaaaactcactcatacatagatgggcatagcaacattattcacaatagccaaaggtagaaacaacttaagaatacataaaaggatcactggctaaataaaatgtggcatatccatataaaggaatatttttcagctttacaaagagtgaagtactgatacacgctacaacatgaatgaaccttgaaaacatgatgctaagtacacatacggtggggagagagagggtcttcacaattcttttgtaagcttcagaatggtaacttcaagtcccttatttttagcctactgtcaacaatatatcacaatgtaaaggaaataaaatgaccaccagaataatcaacaaagtgaatgctgaatttattcccctgccaggtaagggaacacagcccagggaacaaattgactgaatagttcacagaggcattcaggggaatatgacttagaagaggggatgatttttcgtgcctatgctaagtawggatagaaagggtgcagtctacgtctaggaagagtggaaagagtccatagttctgtacattattgattaaggcaggtcttgttgttgactacgtatgtcagtctgctcagactgtcacaataaaatatcacaaatcgtgtggcctaaacaacacaaatttattttctcacagttatgcagtttagaagtcccagatcagcatgccagcatggttggttttctggtgagggctctcttcctggtttacagacaactaccttcttgctgtgtcctcacatagcccttccttggtgcatgttcaaggagagagtgtgaggtgtctggtgtttcttcttataaggacactaattctgttggatcaagggcctcatctttctgatctcatttaactttacttttttagagtcctcatttccaaatacagctatcttgaggattagggctttgagataggaatttttgggaaacacaaacattaagtccataacaaggtgtgttctcttaagttacctaatgttaggttattcaaagtgtctgagtaatgcaagaggaataagttacatagatctgctatacaacattgtgccaatagttaacaaagctgtatagcacacttaaaaaatatgttaaaaaagtagaattcacattaagtgtttttaccttgagaaaattaaaagttaaattaaaaaattagaggctgtaactggacagacaatgaagggttacataacgtcaaaaagccttaagacacagcggctcttaatcagcaactttggacacctatatttatctcatcttacgtcatcttaaacattaacggcaagattggatggatgaggttgaaccatacaatactgccatttcataggtaagacatggtctaatattggcagttcttgcagggttcaaattaatgcaaaagacaaatgagtcttaaatgtttgattcaaagcatgctttttgtttagattgtcaatgtggtatatgatctactgtcaacaaacttcatatgtcatgtcttagtctgttttgtgttgctataacagaatactgcagactgggtaatttataatgaacagaaattgattggctcttggttctagaggctggaaagtccaagatcaaaggggtggcatcttgtgagggtcttcttgctgtgytgttccacagcagaaggtggaagggcaagagagagggagaaagagaaagagagcgaaagggggccaaaatcccctttttatgacgaccccactctcaagataatggcattaatccattcaccccatcctcaacgcctaatcacctcttggtgcaccccacctcctaacactgttkcattggggattaagtttcaacatacgcttttggagggacacattcaaaccacagcgcttacccataaggcagtgcattatcacaaaagctcatgtgcacaaatatgtgacaaaactctaatgttcaaggtttaatattcaaaagattacttgaataagtattaagtgcagattctgattcagtgggtccagggtggctcttagtaatccacatagtaaacaacggctgctggagattctgaagcaggtgcacttattactctaagaaaccgtgaacatatggagccttttgggctattgagatattattttgaaaagcctgagtagcactaatggtagaaagcccttatatggagctactttgtgccaggcactattctaatatattattaatttaactttcrcaacgatcctatgatgcatggaccatcattattaatttacagataaaaaggcagagaccaaatataaagtgactatcctgctaacaggtggctaatcaatggyagagctaggatttgaatgcagtcagtgttggctcctctgctaacctgtttgtcttctatctgaccaaccttcaacatctataaaggtcatggagaagtgagaactctggctaaccccacgaactgggattgccacacagcccatgctgtgattttgaacaagttgctgtaacttctttggcctcccttattagtaatagaaaggagttggatttcaaacgctaagatttcatgaaactataaatcacttacataaaaatccgctggccatctgyggcaagattaaccagtttaatgagagtctgcttgatgccagacatcgtgttaaaattatatcagttaagccttgggaccttttgtgtttaagtgacagggccaaaccccaagttagcttacaccaaaaatggaagaggaatttactagctcttcaattgtctgagagacaataaattactagctcaccaattgtctgagagaaagaataaataagctcactggtgtctcttcttaaaagggcactaatccctctcatcatgaaggctccaccctcaggacttaattaccttccaaaggccccatctccaaataccatcacactaggggttagggcttcaaaatacgaattttgatgggggtgggcacaatgttcatagcacccccacccttcaggtaaccactgatctgttttactagagattaatttgcatttgttgaactttacatgaagggaattataccaaagagtacatacccttttgtgtttggctctctcactgcccataattgttttgagacatccatattgttacatgtatcaagttcattcccttttatggctgagttgtgttccatcatatggctggactacagtttgcttatccattcacccagtggatgcttctttcasttgggaaatctttgccaagcctgggagccctgttgttatgggtctagtcttcgtgtgagacttcatgaggcactgtgagccctactgtctttgctccttcataacatcagtgtcttcctgctgaagaccaccaggaatgcacctcaattcatattctggggctgctgtcacaaatcaccacaaacggagtggcttaaaacatcagaaattttttctttcgtagttctggaggccagatgtctaaaccaagtgttagcagggctgtgctccttctygaggctctgggaaagaatctgtccttgccyctttcagctattggtggccctaggtgtgccttggcttgggcaacataacccaaatctctgcttccatcttcatgtggccttctcccttgtgccttctctttttctgtctctgataaggacacccatcattaattagatttagggcccatcctaatccaggatggcctttcctagagatccttgcctcagtgacatcttcagagactcttattccaagtggatcactccctttcttggcttcctttgatcttgccttccattacttccttatagctggtccagtgacaaactcagtttaaggctcaatctcaccagcttctaagctaaatatgatttaggtgggawacagagcatctgctctagccctagaataagtcctttctcacatcctcttaaagagatgccccaccatttcccaggatgtatgttattcctcgttgcaacaagtattgagcacaatctgttcgattacaggtgctgtagtgggttgaatagtggaccytcctccccacaaaaagatatgtttaccaggaacctcagaaggtatgttggtcaggctagaagatcagggcctggtcggtaggtgctcttcatcttacctaaactacattgttttttttttttktttttttttttttttttttttgagacggagtttcactctttcgaaaggctggagtgcagtggcgtgatcccagctcactacaacctctgccccctggggtccaagcgattcttacgtctcagcctcatgagtagctgggattayaggcatgcgccaccacgcctggctaatttttgtgtttttagtagagacggagcttcaccatgttggccaggttggtctcaaactcctgacctcaggtgatctgcccaccttggcttcccacagtgttgggattacaggcataagccactgcggccagccctaaattacattttgcttaggagttggacaagattgagccttcaacttggtttgtcatcataccagctgcaataggggagccaaagaaggcagaagcaaatgaagctacactgtgggaatgagcaagaacattgctcacctgggctcaggsggccttgcctgcctttgtctgcccaagtcactgataccagttcctacatacagtagacactgattaaatatttattggatgaacaaatgaacatttctaactttgcttctttttctcccattattcccataggaggggccccaatggaaaggctggcatcttatggctcatcaaaggcggctgtgaccatgttctcatcagttatgagactggagctttccaagtggggaattaaagttgcttccatccaacctggaggcttcctaacaagtaggtttctgagcccaagaacctgtgatgttcatcctggaaggaaccccgaaggtcctcttggtctgacagagcacacattgaacccctcattgttgtcaaagatgagcacagccagagatcagttaaagkggtgaaaacaggtttgattcagtaactgctgacagtaggggaaagagctaagctccattctgatttgtgcgaaggtgttttaaacattttaaaaggaaaaccagggagaggggaaagcatggctcagtaagtcagattagtgaaaaagtacaagggtccatcagtgtccatgcagaggggccagctgtgtctgccagctggcaattaaagaagtccagattctgtcttcccacagagacagagaaacagaggtctgatccttgatgattcagttccaaaggaatggctctcagatcctggagagaaatgcttctgcattgcaagagctatatatttacaatttaaagttcttttttagtaagtatttcaggaaagggaagtcagggacctctcagggatgtcttggatagaacaaatagtaaaattttctggcaaggttgagccttcttaggcaggcattttagggaggggctggtgttatccaagggacagggccttatgctgctagaaactgtgctggagtttcgttaagtctcttagtgcagggggttgggaaggggttgtcatgcatccagagytctccagctctcagtgtccacccagcagggcttgggttgcatgggcctcttctaagtgccatgctctccatgtatggcttcacccctgcttcctttcacaaaggaattgcgttggcttataagtcatcagcaagcagaggccacactgggttagaaccctggtcccctggtgcctgctctgagcgggacctttctrggacacacactccctccctcaatggtagagttgtatttggtctgtgggaacgcagctcaaaaatggtccctaactgactctcaccaattttgattattttcattgccccacccaaacctgtttaacaatgtataatccattagtttcatactaggtttctttatttggcttcagagcttattttcatctaaaagtttgagcagatastcagagtaacatttattagtcttttgytgccattggccaagaaggtttccttccccagcttctttatatttcagaaacaatatttttctccttccctctgaagaatatgacccacctcccctccaccscaagaggagaaggccmttctctccactcccctccctgcatatctgaactctgggaagaggcagcctaccccaaggctcagtcttcagttctgggccatcaaacatttaaycgatgattcaagtgaagatgtaaaaagtatgtctaataaaagaccacagactgggaggtattgctaaatgcacgaaagaacaaaccctaaaggtttgaatgttatcccaaatgcaaaagataaaatctatacagaaatattgaaattttggcttgaaacacttgatagctgagaacctcctaaggttgcagagggggtgcaagactcagagaaagggacagagacccagagaaagggatatgggtcaacacgatgacaggcaggaccagggcgatagaaatgcagagaagatgaagtcttgagatgggtttccaacttggggactccctgggttgggaggagaattgaggagaggagatggagaagagacatgggtcagaggtgaagccaaatgtgctggttggactgagagactgggatacaaagagagggaagctgcttgagagctggtacaagagggaaatggtgaatttgattttgaatctggcaggaggattgagtgtttggtgacacagcccaaagagaattccaacacacagatgtaaaattccatttagacgagagagcaatcctgcagttaggttatgattttggagattcagtataattgctatgcataatagttctggagagctgttctcacccacttaccatacattctttactgatgttgatcttaatttttaaaatcgagaaatatataaacagaaaaaagcattatacgcacatggttcaacaaattattataaatcctcttgtacttaacacccagatcaaaaaataaaacattaccaacacccagaagcccctatatgatcctctaccatcacagccgtctccaacctcccaataggtaatcacctcttactttttgtaatgatcatttatttgcttttctttgtagagtcacatccagcccamttaatagcatttgactttaactgcttttgcactttcaatggaatcaatatgtatgtatccttttgtgtctggcttctttcactcaatattctgattagacaatttatctgcactgtgtgtagctgtagtccactcatttcattgctgtgcagtattctgtgaatatgccatgattttctactgttgatgggatgtttgagtcccttctagtttgaacaagtatgaacaatgcagctatgaactttctggtacatgtactttggtttttgtgtgcttgaattttcccatgacacatgctrcagagtgaaattgttaccaaaaagggctcctgatccagattccaagagagggtttttggatcttgtgtgagaaagaatttggggtgaatctgtagagtaaagtgaaagcaagtttattaagaaagtaaaggaataaaagaatgcctacttcttaggcagagcagcagcatggactgcttgactgagtatacttatagttacttcttgattatattctagacaaggagtggattattcatgagttttctgggaaagtgggagggatggcctggaactgtgggttcctccccyttttagaccatacagagcaacttctggacattgccatggcatttataaactgtcctggtgctggtggaagtgtcttttagcatgctaatgcattataagtagcatataatgagcagtgaggatgaccagaggtcactgttgttgccatcttgattttggtgggttttggctggctgctttaccacatcctgttttatcagcagagttactatgacttgtatcttgtgataccaatcctgccaacctcttatctaatcctgtgattaagaatgcttaacctccagggaatgcagcccagcaggtctcattctcattttacccagcccctattcaagatggagttactcttgttcaaatgcctctgaaagaatgactagatcatagagttttcctgtcttcagctttactgaatcataccaacctgttttctaaaatattgctccaatttatacctctaccctttctatgtatactccaatcaccacaactctgaggagcaggtttcattgacattattctccaggtgatggtgctgagttggggtggataacatgcccttgggtggggatctggtatcccacgtacacygtgawggtggaaaatttgagatcagatcctgagatgcagtgcctgggttcttccttttatatcaggctgccccccagtttaaagctatttgatgagctctctsaaggcaagaagcccaagagcagaaggctgagaactcatgtttggagaatgacacttcatacttatatttatttgaaggtaggggcaagaaaaggaatcttcagggacacagacaaggagcttctgaagacattctaagagacattscagatttttctggtgccctgaaataaagatagctaaatcatactgcatgctagattagcagattttaagtgctttatgygcattatctcccttaatcctcacctgtgaagtaggcatcataatagccccatcttgcagtgagaaaatggaggctcagagaagttaaggaagttccaaagccatagagctgataggaggcagagatgggattttgatacaggtcatatcaataacttcattgtgtgcagcaccaaagtggcatgggagggatgggtagggagagtctgtcaaaagtgggagatgatgacggactgatggcaaaaggctgatggctttgtcactcacagagacagctttggggactctggataggttacccacaagagtggccagaaattccatgaggtgtttaaagaagaatgaggtgtcagccyacgaagacagggacaggggagaggtaggaggaggaatagtagctcacgaaaacatgtttttcaggacctagaaacctccagagtaattgtcatgataatcatttctttaagcacggtgtgtgccttcctgaaaagaaaggagcaattgaaactccgtttgcatttccataagtataattggatttcactggcctacatttccaagtgagcatccctccttctctgcagtcctgatatccaggagtcaccsaagctagcaagggctcatccccacagctatgtgaacaaccaagcactttgcaggagacagcgtgggagaccgcaagctttttggaaagtaatctggcagtagctattaaaattcaaaattaatgtgccttcgaccaggctgtactttgaggactcttgcctacagaaataaagccaaagtaaaaacgaataggtggtgaaagtcgatttactgcagcagtgcctgaaatgctgaaacctataggaacaactggaaggtcattggatagggaagtgattggctaaaagctgttcaatgggaaattctgttgctctggtttaatccrtagacattgacaagaagggaggtctgtgatttattactaagccaaaacaaattcatggaaaatataaacaccatagtatgatcctttttgtttttgttatttcctggtaaaaaaaattaaaccaaattcttcyatgtgtatgtatgtttgtatgaacaaggaaggaatgtagaagggcacacaaaactgttagttaccttagaggagattaattttaaaaatatgcacatctccttattattcactttatataatgaggaggcagagctgctacattttaaagtaaataaattatttaattttatatgataagcaggtattgtctttattttaaaaatatatttatacttaattgcatgtagtttgtgtattaaaatttatgtgtgaattatattaaaattacacttcatatatttttaaaaacataaatgaaaattatatccattaagtagattaaatatttaaaatcctgtatttatttatttatttattgagatggagtctcactctctcacccaggctggagcgcagtggtgcgatctcagctcactgtaacctctgcctcctgggttcaagcaattctccctgcttcagcctcccaggtagctgggattccaggcacccaccaccatgcccagctaatttttgtattttttagtagacacagggtttcaccatgttggctaggctggtcttgaactcctgacctcaggtgatccacctacctgggcctcccaaagtgctgggattgcaggcatgagccaccatgcccagcctaaaatcctatatttaattggtaggcattacttctatatcttaaaaaattatacgtgtgtatgcttatatgagtgtatatatactatattatatacagtatatattatattgtagacattacatgatatattatatatgtaatagtcaccaaaagatgagtgtctgtggcagcagcatttctaaaggcccagttgaaaataagcgcagtgcccatcacagtatagtggataaataattcatggcatttttatgcaacggaatactatgctgaaaggagaatcaacacacagtgcatggatgaatgtcacaaatatactgttgaataaagaagctgatgctaaacaatgagtgctattcatacgattccattyatataaatgttcaaaaccagccaagatgaatctgtcctattaatcaggaaaatggttactgagaagtgggctgaaaggagagattttaaggctggtcctgttctgttttgtttttttttttctttttttccctttttcttttcttaaaattggagtgtagctctgttgcccaggctagagtgcagtggtgcagtcatataatagctcactgcatcctccaactcgtgggctcgaggggtcctcccacttcagtctcccgaatagctgggactagagataagcaccattgtgcccagctaaatttctgtgtatatgtctatgtctatgtctatgtctatgtctatgtctatgtctatgtgtgtgtatgtgtgtgtgtgtgtatatatatatacacatatatatgtgtgtgtatatatatatacacatatatatgtgtgtgtatatatatatacacattatatatgtgtacacacacacacacacagacacatatatatatatattttagagatgggatctcgctatgttgcccaggctgatcttgaactcctaggctcaagcgattccccttcctgggcctcccaaagtgctgagattacaggtatgagccacggtgcccagacttgttttgttcttgatctgtttgctagtcacatgggctatcagtttggaaaaatccaattacgtgtgcacttttctgtatgtaggtttagaaatgataataaatgccattataaagcacacattttaaaaggcgtttgcaggccaggcgtggtggctcacgcctgaaatctcagcactttgggaggccgaggcaggtggaccaattgaggtcaggagttcaagaccagcctggccaacatggcaaaaccccgtgtctactaaaaatataaaaattagccgggcatgttggtgatgcctgtaatcccagctactcgggaggctgaggcaagagaatcacttcaactctggaggcagaggttgcagtgagctgagatcacaccactgcacttaagcctgagagacagagaaagactctgtatcccaaaaataaaaaaataaaaaaataaataaataaasgtcatttgcaaagggccatccttcccaacagagacaagcgcctgctccctgacttccttggccttcccaggatctgactcttccctttcctttcaccccagatatcgcaggcaccagtgacaagtgggaaaagctggagaaggacattctggaccacctccccgctgaggtacaggaagactacggccaggactacatcttagcacagcggaatttcctcctattgatcaactcgttagccagcaaggacttctctccggtgctgcgggacatccagcatgcyatcttggcgaagagcccttttgcctattacacgccagggaaaggcgcttacttgtggatctgccttgctcactatttgcctattggcatatatgattactttgctaaaagacattttggccaagacaagcccatgcccagagctctaagaatgcctaactacaagaaaaaggccacctaggcaatggaagccctcaaagaagtcggaatgtcatagtcttgaaatgaaagggaaactgggaaactgggtttctcattaaagttgtttcccactctgtattctctgtgaaattcattgattgaatagtactttgtagtgagaaggctggagaatagcaacagcctcatggagaatgttaattgagttcctactatgcaccagatacattacaggtattctttcatctagttctcatcagagaattgaggtgggtatctttgcccctacttaatataatcagagagatttcttgtcacactctagcaaaaggcagggccagaattcaaatcctgagttggactccactgcctgccaagagaagaggaagagaaagagagagacaaggagaaagagagagggaaggaaaggaggaggcagaaatggcaagggcaacagtccaatggatcttgcaagtcttcctcactgtgcattgatattccgtgactactgcacccaaggtattggattcatggtaaatcatcagggcttcgttctcttccttcctcttttttttctctaccaggagcactggagacaataggataaggtgtcctatctcaagcagaacgctggagacctcttggcagatctagggaatgtggctgactggtttagtgcccatagtaaccagcactgttactatgttacccccatccgagcatactgggatggaaaagccagtatcattacctggaagagcttagtggaagggagcaatgtcagataattatagaagtatggccaaggtcagttgggtatggcaaaaggggaggagctggtgagcagagcgtacataaagggaatcagaatatcttgctcattgcaaacctctctgttccatttcctttctaaaacgtggaggctcttttcctattttccttggcgatttcatcaaagtatatactatgacaatgctctgcaattttctcccagagaaaataataaataaccatatagcaagataaacatttataaaatactaacacgatatatttttaatggctagtcaaactgacagcccagtggctctccaccattgcttcagagcagaatggaaagaaaaaaaaatcagtctaagtgttgatttccctagtaggcactttctggggataagtgttgttgaagccaacacttctatttgcatgattccagtgttgttgagacaacaagcgatttatttagcttatagtccaaagtttggaagagcattgaggatggtgtgcttccctaaaagccaacagtcctcaaagagtgatccctggacctgaagcattagcatcgcctgagactctattagaaacacagattctcaggagccaccccaattctgtattacatacctatggctgctgtaacaaattaccatgtatgtagtagtttaaagcagcataaaggcatgacctttcagttctggaggtcagaattctgaaatgagtcttgcaatgctaaaatcaagtggtcagcagacctgtgttcattctggagactccagggaagactccatctgttgccttttgcagcattcaaaggcctgcattcctttgcttatggcagcaccactccaatctcctcttccattgtcacatcttttctgatagactctcctgcctcccgctcataaggccctcctcattacattgggcttccccagatagtccagtggaatctcccaatgtcaagatcctcaatttaatcacaactgcgaagtcctttttgccacataagataacggattcacaggctttgaggattcgtacactattatcattgttaaggactatattagtccatttgttcactgctataaagaaatacctgagaccgggtaacttataaagaaaagaggtttcattgcctcacagttccacaggctgtacaggaagcatggatagggaggcctcaggaaacttacaattatggcagaaggtgaaggggaagcgggcacatcttcacatggccagagcaggaggaagagagagtggcggggaggtactacatacttttaaacaaccacacctcacaataactcactcactatcactaaaacagcaccaaaggggacatccatccccataatcaaatcaccttccactagcccccacctccaacattggagattacaatttgacataaaatttgggtggggacataggccccaatcatatcgaagaccattgtcctactgaccacagctactgaatcagaaacaggattggagccagcaacctgtgttgtaaggagatctccaggtgaggcacacccacatttgagaaccactcctccaagccatggagtgagcaggctgttgggtatgtgctcaggctacagaagaagcagggaagactcttgtgagagacatcaagagagctgacatgagagcgtggcatctattctcttgtgcagcttcccaagagttgaaaactctgtaagccatcaggagaagatgctgaatagacacccccatgggtctgagaaccccagatcagagaagctcatattgggttccctgaagaagggcttccacatgatttttggggttacctgggagcaaaataaaccacatggtggtctatttaacaagagaaagattgacaacctctcttgccacccccattgtcagagtccatttgggctgctgcaacaaaacaccatagacaggatagcttctaaacaacagagatttatttctcaccgttctcagggagtccaagatcaagacgctggcagatttggtgtctggtaagggcctgcttcctgattcatagactttcatcttctccttgtgtcctcagatggtggaacaggtgaaggacatctctgggatctctttgataagggcactaatctctttcatgaaggcagtacctcccaaagggcccacctcttaaggggattaggttttaacatattaatttttttgggacacaaacatacagaccttagcccccatcatgactcatttggctttgggtgggagtgaggagatctgggaaaagtcaactggagctccttaggagagtagggaacagagcttggaagaatcaaggtgccagcatgtgggtcggggaacaccatagcagaggccgctgggtgggcagccttgaacctgggccaaagtgaggatgagaaatctcaactggaagatgagacaaatgctgtttccccaaatgccaggagaatacaccagccccgacaaatctagaccctgaggaaaagagcaaggagaagagaaggcggagggaagagaatcttgaatttagcttcaaatgtatctgttttaaagcagaagagacaaggatgcctgaatgcattaataaaggttcaaatatacttcactttagagcaatacatacaatttatcagaaaacaaaagagacaagtgttacatacaaaataccttcatgccttgaccatgtctacacagtaattgctatccctgatttactgtaagaaaccagtaagagccaagggcagagtgaagccctccgtacatcaacaatgcattgtattcctgggggaaagcatgatgaaacggtggttcaacaacaggactcctggctaaaagaatttccccttccccagtcctgctgttctgctcaagggtaggatgcaaggtgcctttaatacctggctatacagcatcaaggacaaaacccatctaccctctttttctcttccctttctctgttttcccagtgctgccagcaggaaaatggaccatcctcacagcagacccaggataagttaggaaaagcatccagtgaaaatctgatttcttttattacacagggaggcgataaaaggcctacaaataaattctattatagtattggaatagaacattaaatttcatcagtttcattatactagtgataaagaccacgttctggaatgacattctggatgtctggatggtataattcggagaaagagaaattccatgcaaacagctctgatggggtggttgtaactcctgcccagtaaaagtctctagtccagccgacatataatgctccatgcaggggtttagaactcctgaacacacctgctctggaggggctcaaaataaagtgtttctctactgatttgtcttgtaggccaatatctccttctgagatctccaagatcattggtggacatggcagaactggatgggtgtttctgaatcccagtrcaatagccagctcagaattccacatcaagaaatagaagcaaaaggaagagagaaattggggaaagatgtgaaggctcaagatagggagacctcaatatgtttgtagggtaaagttgcttactctcttacctgtcctgccttccttccttttgggattttggtgagactgtcattcaagggacccccaccccagcgaccacaggctgtaacccaggctgagcaaccaacctatatccttggctccagtgattagttcatggtgggcatgtgatacagaaagggccaatcaaagatttttggtcggaagattattaatgggaactgggagaaatgagcagctgctgtactgtactttccatggtaacaagtgaagcttctagagcccaccaaggagagataatctgttagagaattaagccaggagaaaggaaaatggagcagaacaatgaagaaaaacccagatctaatgacatagtttgagccccttgatgtcaccatacctgcagacctaccgtttggattgatttccaaattgtgtgaatgaatacattttctttgaactatttctagctgaacttctattttttgcaacaaagttaatttctgacaaatatacagtcttgaaatagatttagtaaagaatgaggaataaaataacgcttaacagagaaaatgggcaatgtttcaatgtcctaggggagaacgaaagtgatgagagtaaacatgaaaagagaaagtggttagggtaagtgatattaccgtttagtgaccctctcccatagaaaagcaacttttctgttaaaatttattttgggatctcatccccaaagtctatgaacacagtccctctggaagaagatgaattaaaatccttaccaagcctcaaggtggaaatcaaagattttagctgaccagtggcaatcctagattattggactcatgctcagctaggataagagcataatgtatattgtgtctagcacagtaaggcagtaaaacttatctaccatattgcaaaatatagagatgactaaagtgagatcccaaactaccatgggaatcaggaagatcaaggaaactccaggcatttgttgcaaattatttgttcctctcaggtaattccatctgtgtgaagatgttctcgccaccaggtaattgcccagagaattttattatagagagatttttgtttagctccattttctgttctttctccgattttgattacaggtaatgattcattgctggacacaacatcacccctctctttagcattgccctgtgctctgtctcctgactgtcagaggtgaactaattccacatagagaaggttctaaatagaaacatgctgttcttggcctgggtagggttttttggtaaggcttaaatgttcaggcaagaaattttcactgacgaacaaaaagcacacacttccatgttgaatatctaagatgagttgcaaaacaggcctgaaaattatatgagagctaggccagtacacgccattgccattatgatgctggatattttggagggggtgtggctgtgcagtatccacttactttcctacttgggggtcattgcccagatgtgagatcttgatgggaagcagctattttcttccaaccatagaagacataaggtctacatcctgcctctgccagcattttagctccaggacttggacatatgaagaaacatatgaccctcttagggaatggaatgtcaacatgaagggtgaggctgacaatctcccacaaatggaaggtgtgtctcccatttcttggtcctttataaacattcggctccccctaatccaacattttaagctcagtcctccaagcttgccttgattatgtgaataatatatacattcaaaaat

SEQ ID NO: 95827 - DNA, 232136 bp, Homo sapiens
  misc_feature (1)...(232136): n = A,T,C or G
acccggaacctgggaaggagatttccctctttttctctccctgctcatggacctcaagtcttctgttggaggtgggatgacatatggagagagtggaacattttgcaccactttttaataagccctgaagtcgtcttttagttttctacctttagaacatggggaactcatgcctagatggtgatttctagactgctagagaaggctcactcagtctcctcttattttgaccatccatctacccaatgatccatccacccaccctctatccatctattctccatccatccagccatctacttattcatccatctgtccatcctctctccatccacccttccacctacccatccacccactcacccatccatccatccatccatccatccatccgtccatccacccacccattcatttatctatctacccatccatctatccatccattcaccatcatccacccacccatccatctatccatccacccacctatccatctattcatccatccagccacccatccatctatccattcactcattcattcatctatccatacatacattcaccatccatccattcatccattcaccctccattcatcaacgttgactgtacacctactatgtgccagtcactctggtagatgctgaggatctagcaatgaacaagcaagaccaaaattcccatgcttataaagcttatgttctgggaggagtcaggcaataacaaaatcaacaatgaaaagatatagtgggccaggcgtggtggctggtgcctgtaatcccagcactttgggaggctgaggcggtagatcacttgaggtcaggagttggagacctacctggccaacatggtgaaaccccatctctactaaaaatacaaaaattagccaggtttggtgggacccagctactcgggaggctgaggcacaagaatcgcttgaacccgggaggcagagtttgcagggagctgagatggtgccattgcactccagtctgggtgacagagcgagactccatctcaaaaaaaaaaaaaaagagagagatggaaaagatgtagtaccttaaaaggataaatacggtagagaaaaattaatccaaacaggggactggtgagagttgaggaggggtatccaggtggggctcactgagaaggtgacatttgagcaaaaacctgagggaagggagaagggagctgagtgggtatttggggaaagagtattctaggcagagggaacagccagtgcagaagcccagaggtgggagtgggcacagagtgtgaggagcaggaggaggggatgcagccagggcagagtgggcacaggggaggagaggggagggccgggtcagcggctgcttgcgggcctctgggtgtcattggtttcactgtccatccgctcggtccacagtagctccacatgcactgcagcacttgctgctcaccgggccccttgctgagggttcccctgtgcacgtgtcatctcatctccaaaatagtctcatcattctcattttatagatgagaaaactgaggcctgagcctgtaaggtgaaccatgagggatgagaagggaataggctggaagtgggtatttggggtgggtcgggcagagcccaggcctacatgacattctctgggaagaggcagccaggcctttgccaaaaacctccctatggctgccccagttggcccaggttcttgaacctagaagaacccaaatcttcttgtcacaaactctcttggggaggcaagaagcttctctgttcccagccttccaggatgaccagccccagcgggcgtgtgtgtggtggggtgggggagagggagggacagagccaggtttttcctaccaggcaggcccatgcagcttgcgcgtgggtgggtgagagaagggtgggtggttcttagcagaaggagatgatgccaaatgggcccaggaggtggccaatagcatccagaggccagagctgctctggcagaaccaggcactggctccatctcacagtggtccaggggccacatttgagcctcccttggcctgtcttggcaagaaatagagagcagacatttacaaaatgtttggttattcatttgacaaatatttacatgcgtctactgtgtgctaggccctgggttctgtactgagtagatgatgagtgagtgggtggatgggtgggtaaatgaatgagtggatgactgggtggatgggtagctggatcaatggatagatagatggatgatggatgaatagattggtgggtgagtggatgggtgaataaatgggtgggtgtatagatggatgtgtggattgttgagtgactcatggatggatatatattagttgtttattgctatttaacaaatcatttcaaaatttgtggcttaaagcagaaaatatttattatctcactatgtctctggctcaggaatttgggattgcctagctgggttgttctggctcagggcctctcacacggctgctgcaggatggtggcttggtctgcagtttcatatgacagctcgcctggggctggaggatccacttaatgatggatcccttgcacagctattaacaggaggccttggtttctcattacactggcctctctgtaggctatgtgagtgccctcatgatggcagctggctgtattcaaggtcagtgattctagagagaaagagaaagaccaagatggaagccaaagtgcctctgatgaccttgtctccgggtcttacaccattacttctggtttttcctttttttttttttttacctgttagaagcaagtcacaaagttccacccaaactcaaggggaaaggaagtaatttccacctctttgtgttttttttttaagacagggtctcactctgttgctcaggctgaagtgcggtggcgcagtcatagctcactgcagccttgacctcctgggcttaagcgatcctgctgcctcagcctcccaagaagctgggactacaggaacataccaccatgtccaactaatttttggtatttttagtagagagagagagagaggtctcaaactcttgagctcaagggatcctcctgcctcgacctcccaaagtgttggattacagccgtgagccaatatgcccgattagtttctacctcttgaaggaggagtatgaaagaatgtgtgggcacagtttaatagcatcacaagagataaatggctagagcagcaataattcttccagggtgctgaaatcttagaatgattttaaaccagggattctcaacagtaacttcatgttaaattcctctgggacactaagaaaatatcagttttggggaatcaaccttgacattcttattagtctggggagtgacttggacattggcatctgtgcttttgttttgtggaatgattttaagctttaattgtgaaacccagcatatatgttctgctttttaaaattataataaaaatataacataaaagttaccattttaactatttatttatttatttattttcaagacagggtctcactctgtcacccaggttggagtgcagtggcgcaatttcagctcactgcaaccttcgcctcccaggcttaagcaatcctcctacttcaccctcccgagtagctgggaccacaggtgcccgccaccacacctggctaattttttgtatttttggtagagatgaggtttctccatgttgcgcaggctggtctggaactcctgagctcaggtgatccatccacctcagtctcccaaagtgctgggatcataggtgtgagccactgtgcctggcccattttaacaatttttgagtgtcccattcagtggcactctgtacattcacactgccatgcaaccatccccctcagtacactttcatcttcccaaagggaaactctgggcccattaaacacaaattccccatttccgcctcctcctgcagcccctggcagccaccgtcctgctttgtgcctctatgaatccgactactctaggagtctcctgtttgcagaaactacagtatttgtccttctgtgtctggtttacttcacttagcacaatatctctgaggtttatccatattgtaccgtgtgtcaattttttttgttttgttttttgtttgtttgtttctttgagatggagtcttgctctgttgcccacgggagtgcagtggcgcaatctcggctcactacaacctccgcctcccaggttcaagtgattctcctgcctcagcctcctgagtagctggaattacaggtgtgcaccacgacgcccagctaatttttgtatttttactagagacggggtttcaccatgttggccaggttggtctccaactcctgacttcaggtgatccgcctgcgttggcctcccaaagtgctgggattacaggcatgagccaccgcgcctggccatgtgtcagagttttatttcttttacagttgactaatattctgttgtctgtctagaccacatttctttatccatgcacctgtggatagactttaaaaatccacagcggtgggtttttaaagtgtcctggtggtgctgctgtgcaatcagtgatgaaaaccaaagcctggatggcacggtggctcatgcctgtaatcccagcactttgggaggccaaagcgggtggatcactttgaggtcaggagttggagaccagcttggccaacatggcgaaaccccgtctctactaaaaatacaaaaaattagccaggtgtagtggtgggcacctgtaatcccagctactcaggaggctgaggcacaagaattgcttgaacccaggaggcagaggttgcggtgagccgagatcgcgtcactgcactccagtctgggcgacagagtgagactctgttacataaaaaagaaaagaaagaaaaaaccaaggcataagtccagcatttcgcaaatcctctctgcacaatagaatcacctgagagctgttttaaacaatgcggatggctggcgcctgtcctagagcagctgcatcagattctgggctgggggagaggtggggctagccaggaattgagttccttgcagcgygggggagggcaaggtgtgcagaattatttcccagtctctgctgcctcctggtggcacaattgacaacagtctggtagtgacgcctgtcagcatggttcctcttcctctccagggctggcttacccagccccaaaggaccccactcccgggggtctggggaccctgaaggctcttgtctgacccctctccccacctgtatttcctggctggccttgcgtgcctctgtgtttagaagaaccgacgagtttattagagaaggaaagactgcactgtgtgaccttgaataagacagttcgcccgtgcctcagtttccctgactttcacgcaaggatcaccacggtttcctctgacaagttgctgagatggcaggcaagcatgcgtgttagggctggggaggccaccgcggggaggtttcgtaccctcagcataattgccattaggggccagatcacttggtggggaccgtccgtgcactgtagggtgctgaacagcttccctggccttgacctcctagatgccagtagcatccctgagctgggataatcaaaaactgtctccagataggggcaatgtcccctgagtgcaggattgccaaataaaatagttaaatttgaatttaactttgaaaatttgaatttcagataagcacataatgtttttgtataattatgtccaaagactgcatttttatttcctaaatctggaaacccttcctgagggacaaaatcactccagctggcactagccagtgcccttgtgagtttttgacacctgtttcaagaactcacaccaggctgggggctaaggcggcagatggggaagttgtggcaggggcggaacttgccccagcctggcagggggaggggtgccgtcttgcgggagtgggacaggcaggcccaggagtgataagcgtgaactagagagtgctgtgcaggaggaagctggggccgccgtcgggccttctccctccaggggcccaagagccactggtactcagtgtctgggtgggggcaggggggatttttgttctcccagcacctgcggctgttgagaccagagaagctggtggtcgaccacagcctggggtattagttcacccctagcttctccccagcgagaccccagggcccttgggcacaggggattaagcctctatctgcttacgtgcaagcggaagaaataggcccagagagcaacagtggcgggtctgcagtcacacagccaacttgcgcttgtggcagtggcaaggttggtgagtatctgartcttcaggccacggcattttccsctcgagtggagcctggtaagtggcctctatttctggtacattctctgggagcccccagtattttccagacagagggcactgaagacaggctttgtgctgaggatgggtcacctgaggtccagctgctcccccgtactcctccagggaagggctgggaccccttctcctgcggctgcccctaagaggacagattgttgcttytgtgggatgakgagaggcaatgtggcatggtggttaagcgcgtggacttggagccagacggcctggggctgaatcctggctccgcctctcaccaactgtgaccttgggcaaggtacttaaacaccctgtgcctccattcttaatccatgaaatgggcatgatgaaatgacacctactccgtagggttgttagaagaatgaaatgaattagtaagtgctcagaacagtgtgtggggccgggcacagtggcacatgcctgtaatcccagcgctttgggaggccaaggcaggtggatcacttgaggtcaggaatttgaaaccagcctggccaagatggtgaaaccctgtctctactaaaagtacaaaaattagctgtgtggtggcccatgcctgcaatcacagttactcgggaggctgaggcaggagaatcacttgagcctgggaggtgggggttgcagtgagctgagacagcgccagtgcataccagcctgggtaacaaagcaagactctgtctccaaaaaaaaaaaaaaaaaaagaaagaaaagaaacaaaaagaaaagaagaaaaccagtgtgtggcaggtacgcwggtagtaaggtttacttttcttctagtgacatttactgtcttccttaggaagctggttcagtggggctgtcgaccacaggtaccaaccctgccctcccctacagagtatgtgacgtaggcacagccaatgactgcatcccagtgcttcgaccagtcacagggtcaagggtgagcacgtgaccccagcaaatgagcacatccctggggctggcgtgcagaggctctgggagtaaagcttccttttccctggccaggtgcagtggctcacacctgtaatcccagcactttggagtcccaagcaggcagatcgcctgaagtcgggagtktgagaccagcctgggtgaaaccccatctctaataaaagtacaaaaaattagccgggtgtggtggtatgtgcctgcaatcccagctacccaggaggctgaggcaggagaacttgggaggcataggttgcactgagttgagatagtgccagtgcactccagcttaggcaacagagccagactccatctcaaaaaaaaaaaaaaaaaaaaaaaaaaaaaaaaaaaaccgaaaccaaaccaaaacacaaccaaagcttcctcttcccactgtgggtgcagaggcctggggctgtggtcagcatccctagcacatggggcttaaaaagaatgaaaccaacccattgagggttctcttgagtccctggattcaccttgcctgccaggcagaatcctccctggaattcccacagatgtgagacagtgaatctcccagtttgcttaagcaagtttgaatagagttctaatccatgcaccctctgtgccccatagagcaagaggggttcccccaaggcagtccccttcctccatagaccagcgctcttggcctttgttttgatccacctgctgccccgacatccaggcccagcctcacaccgagacactggcccactctcagggaggtgggtcctccaggtctgatgtgattagagctcgcttayaagaggaaacaaacaaacttgtattaaatacctgctgtgtgccaggtattgtgctggggctttgaggttattttagttgtattttacagatgaggaaactatagctcagagaggtaaagtgacttgttcaagctcacacagccaggaagtagaatcgcttctatttgaacccagtctggttccaaagcatccactatatcatatggcttattacttgcaggaggaagattttttttccgtcaaaaatttttgccctttggattttccccaatttgtacatatttatgggttacagagtgayattttgatacacatataaaatatgtaatgatcaggccagacgtggtggctcacacctttgatcccagccctttgggaggccaaggcgggcagatcagttgaggccaggagttcaagaccagcctggccaacatggtgaaaccctgtctctacgaaaaatacaaaaatgaacttggtgtggtggtgcaagcctgtagtccccagctccttgggaggctgaggcaagagaatcgcttgaacccgggaggcagaggttgcagtgagctgagattgtgccactgaactctagcctgggcgaagagagactgtctcaaaaaaaaaatgtataatgatcaaatcagagtcattatcatatccatcacttcaaacgtttgtcatttctttgtgttgtgaacattgaaaatctcttctagctttttgaaaatatacaataagccatagttaaccatattcaccctacagtgatgcagaacgccagagcgcgttcctcctacctagctgaaatttgtgtgcattcaccaacttctccctatcctcccctccctcctccccttcccagcctccagtattcaaaattctactcgcttcctccatgtgctcaacatttaaacacagattttaattgtggtacaaagcacacaaaagttaccattgtgggggcggggggggggcggtgttggctaaaattgaaaaggtagcagagtacctctcagtcaaaagatgacctagagagtccattactccgagtacatagtacccctggaaaataggggttaggtctcattcatgcattcaacctgctaggtgccaggcagtgctcaaggaagggcctgactgggatgagaccaatgagggctccaggtgcagagttgaggatggtgctgcttcacaggtgatgaccctgcctgtgtatgactctaagagtgactgccatcttccatcctactcctggggccsagcctatctccctggagccccagcccccatgcagggtgaaggagggtttagatgacttggcagagtcttagtccagccaggaaaggaacgtcccatgcactacccctgagaaatgactccatcaacagtggtttcaggagcgcttagtatgtgctgggaactggggtggacaggagtgaccacaggcatcccactgctttcagggagctggtggggagarctcaagacagatgatagcacatataatcatttgttaccccacggtgggtgctatgaaggaaagagccaggtgctacgagacgggagtgaacaggggccgggagcctcacttcccatctggcsagacttcctcaggttctgggacccagcttcacagggcccctcgtcctcccagctttgaagttcttatcattggtcccgctcctcttgttcttccagacgtgtgaagagggcctgctctgtgtcattatcaacttgcaataacttagtgtcccatttcatctttttggttctcgatacctgcttcacagttcacctattatgttttatcgacagaagaaccagtctagctgggttcggtggctcatgcctgtagtcccagcactttgggatgctgaagtggggggatcactttagcccaggagtttgagaccagcctgggcaacatagtgagtctctgtctctactaaaaaaagaaaagacagaaaaggaraggaaagaaggaaggaaggaaaggaaaggaagaaaaagatagctggrcatggtggtgcacacctgtagtcacagctactagcgaggctaaggtgggaggttcacacgagcatgggaggttgaggctgcastgagccacagtagcaccacggccttccagtctggatgacagagasagaccctatctcaaaaacaaaaacaaaacaaaagaaccggtgtgcyctgtctcttgactggaccgactggcacagacttgctggaacactggtcacccaggcaaagagcccaggtagagcgacctgcgtggtcaaaagccaggaggctggaaggagtgagggacattyccggagccagaggccacagtggccagaggggagtgaaaggggtgaggttgggctcaggaatgggcacctcatgcaccctgagctgatgagaaccagacttagggcttttattggaactggtgggttaggagatcctctctcttgtggatgtgaagccaggagaaaggaaagctgcagctatgcagggctcctgtgggagacagcctgcctggaggtgaggcccatcccaagggagggagagtggcgagatgaagaaagactaagtcccaatgacattgttggagccccttgatccagctgtgactgtggccctkggttttcagttacatgaggggataacctccttttttttctttttctttttttttttaagacagagtcttgcactgttatccaggctggagtgcagtggtgcgatcttggctcactgccacctccacctcctgggttcaagcaattctcctgcctcggcctcccaagtagctgagattacaggcatccgccactgcacccagctaattttttgtatttttagtaaagacagggtttcactgtgttggccaggatggtctcaaactcctgacctcgtgatccacccgcctcggcctcccaaagtgctgggattacaggtgtgagccaccgtgcccggccaacttccctttttttttttttttttgtttgagatggagtctcactatgtcaccaggctggtgtgcagtggcgtgatttcggctcactgtcagctccggctcctgggttcacgccattctgcctcagcctcccaagtagctgggattacaggtgcccgccaccaagcctggctaatttttgtatttttagtagagacggggtttcaccatattagctaggatggtctcaatctcctgacctcttgatctgcccgccttgccctccgaaagtgttgggattacaggcatgagccaccgtgccctgtcccccaacttccctttttgattaaaacagattgaggtgacttttcttctcacttgtaaccaaaaaaattccaaatcttttggcactccataaatagcagtcatgatggtgaagctggtggggatgataaggaggcaagtttgtttttttttaagacagtcgtgctctgtcacccagaccatggctctctgcagccttgacctcctgggctcaagtgatctcctacctcagcctcttgagtagctgggtctacaggcatgggtcaccatacccagctaattttttttttacaggcaaagtctcactatgttgcccaggctgatcttgaactcctggactcaaacaattcttccgcctcagcctcccaaagtgctgggattacagrcatgagctactgctcccagcccaggaattggaattttttagrgcatctggagaggtgaaaaagggggccaacaggctggatgctgcaggaaggaaggggaaaggaagaagggttggtttttctggattcaaagtgtctcatcttaactccaaccctggactttaaaaataatgttatgcagtggaacctttttcctgttgattccataaacattcagcaaagaatataagatgattaagtgctggttgtaaatgacctccagcaacggggctgggttttgcatccaggtcactgcagggctgaactagaaaaggttgtgttgggtaacccagcccaagattcaatcttaatcggtctaagccagtggtggcattcctagcctccctcccactgattggccgggaagggcatatgacctagtgctgacccatgagaggtaaggagagttgccggaagccttcttggatgacctgtggccacaggaacctctcttttctgtaagttgcaatatcccttagggtagtcactgaaaatcttcatgtttgaccatcctctgcctttcccaagttgaattttgctcagtttcatccaaacaacgactataactcagggttgcattcaacatatttaacaaccgagataacatggaccctgactaactaatagccactggccacagactgcaggccatatggtaattaccagctggatgtcaaccccaagtctgctccctattatgggctgcatgtagttggctcctggggatacagagataaattatgtgsatttactgttctcaaggtgggcagtctggtagcttctgtaagaaaaagtaggttaggtctagaatgccaatgtttcgcattttccctgtaaatctcaggttctgaccttggctgacattagggtcaggggggagcttggcccaggctgattcagcagatctggaggggcatgggcatgtatgtttaaacaaagtcccagttgggaacctctgctttcagctatccattcagaggccgagttcagcggccagacgttattcctgagcctcctggctgtcatacagcgaacgacctgactctctgtaggggcgagactagcccattcagaggtgcgtccttcctttttctttagaagggagcaagtgtgtaaaggaggaagaacaagggtgcacttctggggacaacataatgtcacagaaccagggaaggaatttcatggcccctagaaaactcaataggcaagaggatgccatagtcgaatggaacctctattaaccccaaagtcagacaggaccagcccatgggtgctcagggcactgtrgcacaaacaaggccggcctgctggataaagggaggtagaaacgctttcagccctccccggtgcttcccggtttataacttcatctactcgtgacacgtgggggtccgccgccgccactggcagggtgccttgagtgcttgagttttcgcccccagcacaggtggagaacccaactcccagaaaacatctggggcggaaacggaagcatggccgcagcggtgaacgcactgcattctgggaaatgtagtcgaaacggccgctggggcagagtgagcacccacagtggtgccttctggggagggtcgttttcacgtagtccaagagccaggggtgggaaccgcggggctctcaccccagcgccgggaggggatgaacaacttttggattttgaatttaagtgtaggatttcgttttgtcaatctccaaccctaacacccaaggaggcagagaataagagcaatatacacttctgtgatgccattcatgtctgcattgattatttctccgtcgaacttgagtaaacaggcagtttaacctcccaagcatctgtaaagtgggcatattaataattcccacttctcaggcttgataacgtcaatcaggtaactggtacagtgcctgacacaccttcattgccctcttctcttggaaccagtggagcctacaaagcaaacagatgtgctttgtaaccaggagtatgaattctgctccaggagagcacgggggactttgtcatattttgggagttgtaatttcattaaattccagccaaaattcataggcaaaaacktaaggaaatcttgtcacataaagggattcagcaaaggtacaccaaccaccttgctagccaggacacagtgagatgaaagttaaaagcatatgacaagcttctgggtcaagcattctcaaacagtactagcgatagtattaatgggtttatcctctataaagagtaatttggcaatagctttcaaaattacaaaggcatatatgtgcagcttcagtgattccccctctaggaatttctcctgcagacatactccaagattttcaaaatgacaaaagtttaagaatattaatgggactgggcgcggtggctcacacctgtaagcccagcactttgggaggctgaggcgggcagatcacttgaggttaggtgtttgagaccagcctggccaacatgttgaaaccccatctttactaaaaatacagaaactagcctggcgtgatggtgggtgcctgtagtcccagctacacgggacactgaggcacaagaattccttgaacccgggaggtggaggttgcagtgaggtgagattgtgcccctgcactccagcctgggcgacagaggaagactctgtctgaaataataataatattattaatggtagtattgttttttaaataaatgattggaagtcatctacacatctgtggatagaggatgagttacatcaattgtgatgtatccatatactggaataccatgcagccatttaaaataataaggtgcaacatcatctatataatattcttgcaaaaaaatgtttaacctaaatctattatgaggaaagaaacagaaattcaagttaagagagatttgcaaaatgcctggacactcaaaaatgtcagtgtcataaaagacaatatggactggcggactgttttagattacagtagactagagacatgactgttaaatgaatgactttttttctttccatttttttttgagatggaatcacccaggctggagtgcagtagcgtgatcttgggtcactgcaacctctgcgtcccaggttcaagtgattctcctgcctcggcctcccaagtagctgggattacaggcacctgcaagcacactcagctaatttttgtatttttagtagaaacagggtggccccatattggccaggctggtcttgaactcctgacctcagatgatccgcccacctcgacctcccaaagtgctgggattgcaagcctgcgccaccgcacccggccaaggcccttagtttgagatagcctggccaacatggtgaaactccatctctactaaaaatacaaaatttagctgggcttggtggcacatgcgtataatcccagctactcaggaggctgaggcatgagaattgcttgaacctggaaggtggaagttgcagtaagtcgagatggtgccactgtactctagcctgggtgacagagtgagactttgtctcaaacttaaaaaattaaaaaaaaaaaaatgaaaaaagaaaggtgcagagcagagtatgcagaatgctgcatttttgtggaaatgctcaaagactgagtctgaaaggagacacaagaaagaggtgactaaggatgtctcggagaggagaactggtttgggggaggggacattaggggtaaacaggggacttcttgcacttaccccttgagaccttttgaatggcatgccatgtgcctgtataaactattcaaattgcaaaaaaataacttcaaagaagactgtttctgggaaagcacttgtggtcagaaaaccccagactcggatctcctattccccatttgtagacttgatggtaaacccaaacagaaggaaggaaagccagtgactttcatatctgtttccacatcttatcctcattacaaccctgtgaaccagttaggttttatcgggcacatttgacagattaggaaaattgaggctcagagaggctcggtgagatgctggcagagctgggattgaaacagtcttgactatgactgtacctggctccttccctcctgcaggggacctctccaggcactgaggcctgtggcggggggtggcaggagagagctcagggtggaagatgtgggtgaggtttacttccaggctgtggtgctcactaaagctcctttccactgcgactttcacaagggggcccctcagtcaggaaacagcagtctaggatgccgggcagccaaaccagggtttgatttacatgttctcacactactggttgggtggtttatttgggaaggtaggagctaactcagccaaagatcctgttctctgaacccatctgggttgctttttaacatctctataatccctgaagatgtagattttaaaaaatcacttgattgatttttgtcaaattatatgccttaaacaaactaaactttttcattaaataaattatattttattttttatttttttgcgatggagtctcattcactctgtcatccaggccggagtgcagtggtgtgatcttggctcctggcaacctctgcctcctgggttcaagcaattctcctgcctcagcctcctgagtagctgggattacaggcgcctgccaccaagcccagctaattatgtgtatttttagtagagacgaggttttaccatgttggccaggcttgtctcaaactcctgacctcaagtgatccatccgccttggcctcccaaactgctggaatgacaggcgtgagccactgtgcctggccttcattaaataaatttaaagaaatagatgagtgttaccaattcaagcaatgaagtatttggagggcaatttggtgtttctgtcaaaattgttttggtatgtgtccagcatttacacagcaaatgatttatctttccctgtggatatactcaccccactgttcaaggatacatgtccaaagatgcattgcttatgaagcaaagacacaaacctagaaagagctgagatgtccctcaatggacagctgcttcacttaagtgtaatccatctacgcggcggaatgcaaggtaccatggttgagaaaaagaaagctggctggatttgctgacctagaaagagatctgcaatataccgttaagtaaaaacaacagtagaataatatgatcccattgtgaaaaaaaaaaagttaaaaacacatagaggtatctatgttttagcaaacatagaaaacaatgtataagatccagcaatttggctgggcgtggtggctcatgcctgtaatcccagcactttgggagaacaaggcggacagatcacctcaggccaggagttcaagaccagcttggccaacgtggtgaaattccatctctgctaaaaatacaacaacaacaacaaaaattagctggacatggtggcgggcttccgtaatcctagctactcaggaggttgagacagaagaatcccttgaacctgggaggggaagattgcagtgagctgagatctcaccactgcactccagcctgggtggtgatagagtgagactctgtctcaaaaaaaaaaaaaaaaaaaatccagcacagcaatcccacttctggatatttacccaaaagatttgaaatcagtttgttgaaagatgtctgcactgtcaggttcattgcagcatcattcataatagctgagttatggaatcaacctaaatgtccatcaacagattaatgcataaagaaaacgtgccacatatttacaatggactactattcagcatttaaaaagcagaatggggactggagattttttttttttttttttttttgagatagagtctccctcttttgcccaggctggagtgcagtggcgcgatctcggctcactgcaagctccgcctcccgggttcatgccattctcctgcctcagcctcccgagtacttgggactacaggcgcctgccaccacacctgcacctggctaattttttgtatttttagtagagatggggtttcaacatgttagccaggttggtctcgatctcctgacctcaagatccacccacctcagcctcccaaagtgctgggattacaggcgtgagccaccgcacccagcttttttttttttttttttttttttttcaaacagagtttcactcttgttgtccagactggagtacggtagtgcaatcttggctcactacaacctccacctccagggtttaagtgattctcctgcctcagcctcctcagtagctggtattacaggtgcattccaccatgcccagctaattttagtatgtttagtagagatggggtttcactatgttggccaggctggtctcaaactcctgacctcaggtgatccacctgcctcagcctcccatagtgctgggattacaggcatgagccactgcctccagcctggaactagagattgatggccagggaaattctgtcatttgcgacaacatggataaagatggagaacattatgctaagtgaaataagccaggcccagaaagacaagtgtcacatgttctcacttatatgtggaatctaaaacagtcaaactcatagaagcagagagtagaatggtggttacagaggctcgaggacgggaaatggggagatggtggtcaaagcatacaaaatctcagataggaggaatatgggttttttttgagacctattgtatggcgtggtaaatgtcattaataatagagtatggtacatttcaaaattgctaagagagtaaattcaaacagtctcatcacaaaaaagttaagtgtttgaggtgatggatatgttaactagctttaattattccacgttgtattcatagatcataatgtcactttttaccctataaatatgtaaaagagtccgggtgcagtggctcacagctgtaatcctagccctttgggaagtcacggtgggtggatcacctgaggtcaggagttcaagagcagcctggccaccatggtgaaatcttgtctctactaaaaatataaacattaggtggatatggtggcaggcgtctgtaatcttagctactcgggaggctgaggtgggagatttgcttgagcctgggaggcggaggttgcagtgagccgagattgtgccactgcrctccagcctggccaacaaagcaagagtctatctcaaaaaataaatataaaaaaaatataatatatgtatataatatatataaaagagctaggatttgaacctgcaactcttcactgtgatgtaggccccgtctatcacgtatgaactatgagcctgctgagtgctgggtgctgagctgggagctcccactgttccccaacactgcgtctcagagttccctgatgctggaagcctggaggccctcacaattctagggtgtttttagaatatcattgtggggtgaaagcaggttccagcttccccaggtggaaggttccaagaagcacccggccagctctgagaagtacccggccagctcctccactctgcctgacagggaggggactgtgagggttgggacacgtcctcttttaaggctctctcttgctggcttctgaccacttcctctttttcctggggtggaggcggctggccgtggcagcactaatagcagctgggggcggagcaggcctccaaaaaccctcccggagtggctcagcccctcggctgagggcaggagagcaagagtccacttcagcttccatctgaggtctctgtgagcccccaaaggaggggctgggagaggtggtccccttagctccccctccccagccagaacagaatcactgaccctgaggcttggcctgggctgcatctgcttccagcaacttccatgaaggacgtgactgtagacgaggcccactccttgcacggccagggccctcagggtgcccagggaagtgagggccagtgctggaagctccagcctagcactgggcacctccccggtgagtggctgttgggggcagagctgccagcagggagaggacagctatgaaagacgtggctccaggccttgcactgccacctgtcaactcggggctttgggcaggctgcttttctcctttgggcctcagtttcctcatctgtgtagtggagaccaaccacggtacttcgaaggtctgtagaaattcctggtacacagcaagtgcttaataatggtatgagctactattagctagtgcctgtggctcagtctgagctgtccagggtgccccaccagcttctgctgaggatggccagtggcagctcagctctgctcccggcctcgcacccttccacaccccctcggccctgcctctccccgccacctcagcctggcttcccacctgtggcaggtgcaaccaagctcaggtccacacagcacgagctttagttttcccactcacagccccattgagccaatttggtaaaacatccacattggtcattggtgggttatgccaagttcagcattgtgttaaagtcctggcaggttttttttttttttttttttttttgtattctggttaaatatgtataatataaaatttaccattttgaccatttaatttaattttttttttttttgagatggagtctcactctgttgcccaagctggagtgcagtagttgtatcttggctcactgatgcctccacctcccaggttcaagcgattctcctgtatcagcctcattagtagctgggattataggcgcacattaccacgcccagctaatttttgtattttcagtagagaagggtttcaccatgttggccaggctgacctggcctcaagtgatctccctgccttggcctcccaaagtactgggattacaggcatgagccactgcacccagcagtgctgacttttgggaggggatgagggaaccaggaggtgacagatgccacagccactaatgcagatgccacagccatgactgtaggatggggaaaatatgaagggagctcagccgttttatctccaggagaagcagctggagggctgggagagggcctggggagtgggaagtggctgcggaggtgagactcccccatccctgggccaacagccagggctccatggttgggctagatggtcccaccttgggtggaggctgagcctgtgtgaggcgctgccctgtgtcttctcttgcctggcctggccgccatcacaggcccacccccggggagaagattctaggaggaaagtccaggccaggcctgaaaggacttcgctccttggtaactatccctcagggttgacccagtgacacaggttctagggacccacttctaggtttgccgcctccatctccatctccgtctccacctccacctgagttgagaggggatggagaagcttcctggggaaactctgcccttctccacccatccccacctcctatgatttatagaaaaatagcagatcaaatagagaaactcaagagaggcagaaacgaagaagaagggataagagtgatgaaaaggacggatagggaatacacagagaggggcaaaagcaacaaggccagccaggcaaacatcgcagagagccacagacagtatccagagcacaacaggcacactgaggagacacaaaacggaccaaccgaggaaagaagaaacggagggacacattggagacgccactaaggcccgcggagagcaacgggcagagggcggcaccgcgagaacaccccgcgccgcgacacgaaaggaggagacacccgggacagacaaccggccgaaggaagggaaaagcggcggagaacggcggacgcgcaggagaacagcacgacgcagggaatcggcccagacagaggaaggaccgcaaaggcaaacaggaagggcggacaaacaaacgcgnnnnnnnnnnnnnnnnnnnncattcccctcctttcccatctcctttccatttccttttgcctataccttgtaccaagctgggtggtgatccacttggaaattcacaaagcagtgcacagcacttcacagtttgtcaaggacctggtaaggtgtaggtgctcaatacttgctttagtgaatgaatgactgtggggccccatggcagagctcactagtgggaacctcacgtgtctccctagcaatgtcaaaggcctgtctgaagtatgtgtgggagggatccccaaaagggacaccaataactgctctgggatatttaataaaatatgctatgaagattraatggaataatgtgtaggaaatgcctgctacattgtaggtattcaaactttagttatcattattatcttttattttaaagaataatctgattctggatcagaagcagtgactcccacaaaggtcatcaaaaagggaatggtgcaaagtgagagaacattggcagaggaagaaccagctgtgtgtccttaggcaaattgcttaccctctctgagcccccattgcctgatctgtcaaatgggtctggaaatcctcacttcctctgctattgtggtaggcatcagatgagataaaagatgagttcagtcttagcaagcagggaagagaagcccagctgagctgagaggtggctgacaatgggaaaccaccccaagcctgttcctttattttttatttttatttatatatatattttttgagacaaggcctcactctgtcacccaggctggagtacggtgccgtcatcgtggctcactgcagccttgacctcctgggctcaagtgatcctcccgcctcagtctcccaagtagctggggctacaggcatgcaccaccatgcctggctaattttgtattttttttttttttttggtagagatgaggtgtcactatgttgcccaggctggtctcaaacttctgagctctagtgatctgcccacctcggcctcccaaagtgctgggattacaagcgtgagccaccaaacctggcttcagcctgtttctttaacgtcagcttctcttattttttgagacagagtttcactctgtcgcccaagctggagtggggtggtgtgatcttggctcactgtaacctctgcctcctgggttcaagtgattctcgtccctcagcgtcccgagtagctgggattacaggcacccgccaccacatgcagttaatttttgtatttttagtagagatggggttttaccatgttggccaggctagtctccaattcctgacctcaagtgatccgcctgcctcggcctcccaaagtgctgggactacaggtgtgagccactgcacccagcctcagcctgttcctttaacatcagcttctgaaactatctctgcagaagttctgagggtacccctcactcaagctccaggcgtcaggaaaagaacattccacgaagtccatctggaagacggtcctttccctgctgcccccaggtaagcacatggcctccaatctgtcctcgaccaaaccctgactccaggccagtcagcagcaccgagcctggcctgtttccatggagaacaggaaaggcaccagygtgtctgggaggaaagacggcttcctgttcaaagccacagataggatggccataaagcagggtagtagaattgtcattattccgcaagatcaaatagggctgctaagcccaggaaccgtcggggaggcccaatggatgggcyacatttcccctgcaaggccaactggcaagtggccactgccccctaccgcctttcagatagggcttcctgtaggagtatgctgctatgccgggctattattgtcagtattcactgagtgcatagtatatgccagtcactgacctcagcgatctgtaagatttatctcctttaatcctcagaacaaactgctatcttatacggcagctattattattaaccccattttacagatgagggaacggaggcagagagaggttaagtatgttgcccaaggtcacacagtggaggagccaagcctgtactcaatccaggtcatctgaaaccagagcttatgaaggtgaccacaccatacagtgtctcaggacaggggaggccaggcacagaggtggtgggggaaagaaggaagctaagtgagaggtaccaggtcccaagtgaacccctcattaatactggtgttgaagaggcgtggacttcgtgaggcgggtgttattggcactgttttacagataaggagctgagagyccagagagacagtgagttgcccaaacaacaaagctgcgtttgagcctagatgtgtctactgcacagcctggctcktcagtgagcttgctgccttatcctgcttcttcagcagtttgttccgagtctgatctgtcttgagagccccacagcctggggcacaggcctggaacacacacaccgcgcctctacgcctgtttttagaaattgtgtatgggattccagtggttcctacttgctgctactttgggcaaaggagaggaaatgtggtaggaagtgtagtgactctgtatcttggtgagtggttgtttgcctgagctcagatgctgctggaatgaagagttttgaaaagacaatcattttggaatagttgcatctcttttacttttgggtgagtcaaaggaaaaagggagctctaggagggaccacattggaaattccatccacccactcatccacccatctgatcattcaatcatctgtttatccaatcattcatccattcatccatccacccacccattttctgggctccaattttctgctaggccctggaaacaaaacacacaaaacccccaaacaaacaaaaaaacaaaagagtaaaagcctcatagaaaaaaaagctgtttagtgaccagcctggccaagatggtgaaaccccgtctctactaaaaatataaacattagccgggcgcggtggcaggtggctgtaatcccagctacttgggaggctgaggcaagagaatcgcttgaatccaggagacagaggtgcagaagagccgagaaagcgccactgtactccagcctggstgacagagtgagactctgtctcaaaaaagaaaaaagacaagaaaaaagaaaaaaagctgttgtttcacattttcctccagcacttcctattttttacatttggaaaagagctttattgagatataattcatgtatcatgcaattcacacatttaaagtgtgattcgatggcttatagtgtattcacagagcactgacatcatcaccacaatcaatttttgaaacttttcatcacccccaaacagaaacccagtaccccttaggccgtcactccctatacccccttcccccaccccttcaattactcatctactttctttctctgtggatttgcctattccggacatttcatgtacatagaatcatataatatgtggccttttgtgtcaggcttctttcacttagcatcatgtgctgtcgttattgttgctgttttgttttgttttgttttttgaggcactgtctcgatctgtcacccaggctggagcgcagtggtgtgatctcagctctctgcagcttccacctcacgggctcaagcgatcctcccacctcagcctcctgagtaactgggaccacaggcgctcgccaccaggcctggctagatttttgtattattttgcagagatggggtttcgcggtgttcctcaggctgatttcaaagtcctggkctcaagcgatctgcctgcctgggcctcccaaagtgctgggattagaggtgtgaaccctcgtgcccaggctcacttagcattgcattttcaacgtttattcattttgtagcgtggatcagcaaatcgtttctttttattgctgagtaatattccattttatggatagatcacatctggttcatttgttcatcagttgayggacatttgggttgcctctccttttggctattataaataatgctgctgttaacatttatgtgtaagtgtttgtgtggatgagctttcatttctttttggtatttacctaggagtggccttgctgagtcatacagtagctctgcgtttgaccttttgaggaactgctaaactattttccacagcagctgcaacatttactactcccaccagcagtgtaggaagcttccaatttctccatatcctcaccaatacttgttattgtccatctctcttttttttttttttcctgagacagagtctcactctgttgcccaggctagagtgcagtggcacaatctcagctcactgcaacctttgcctcccaggttcaagcgattctcctgcctcagcctcccgagtagctgggattacaggtgcacaccaccatgcccagctaatttttatatttttagtagagacggggtttcaccatgttggccaggctggtctcgaactcctgacctcaggtgatccacctgcctcggcctcccaaagtgctgagattacaggcgtgagccaccgcacccggctatcgtccatctttttaaatttagcctttctagcaggtgtgaagtgaaacctcattatggttttaatttacatttcccagraagtatctttacgtgttattatcagtcatttgtatattttctttgaagaaatgtccatttggattctttacccactgttaattgggttgtcttttcattattgagttgtaagagttctttatagattctagatactagtcctttatcagatacatgatttgcaaatattctttcctattctgtaggctccagttccttctcattgttttgttttgtttttggtttttaaagcacacatcctcatgctaagatatttgaaaaagccaaaaatgtataaagagatggaaaaagaacctcccacagaccactatgattaatatttaatcttttttatttcccttttaaatatatttacttatgttatttattctttgataggtaatatctgcactgctgcagaattctaaaggtctaaaatcacagattcaatgagtctcccaagcaggaaagctgcattttcaacctgaatagatctactgcaaagcctggctctttcagtgcctctgccaccgtatcctacttcctccaaagtttctttctagtctgatctgtcttgagacccccagtgcctggagcccctgtcatccaaactcctcctagggaccgctactgttgccgctttctagatgatcttccaaggatagcttatagcttgtatatatggacatatacttgtcaaatttcccttaaattgtacgttacccattgcactgagcacttgtccgtagctcctttccagtcttgtagctctgctgagttttctttctatagttaagaatacaatgtaggccgggcgtggtggctcacgcctgtaatcccagcactttgggaggccgaggcgggcagatcacaaggtcaggagatcgagaccatcctggctaacacggtgaaaccccgtctctactaaaaatacgaaaaattagccgggagtggtggcgggcgcctgtagtcccagctgctggggaggctgaggcaggagaatggcgtgaacctggaaggcggagcttgcagtgagccgagatcgcgccactgctcatctatcagttgtaggaggcacagcaggaattcattctagtgttaggaagaatgaggaatttattaaaggacattaggtggcttggagagtctccaggagggcagagatccaggtctggagtctacatagccagaaacaaagcacaaccacaggtgggattgctcgagtagagcagtgcccactgccaggactgggcacagagcatggctggttctgctgggctcagggtgctgcaccctctggttctctccctccagataccaggtgtttctgccactacctttgccagatatgtaccctctracacctgcttctcttgttggtggcttttggacacaagcctgatgctggtacgtctgactatggggcagagctgagcgtccctacccaagctgcaagggagtgtgggaaaacaagatctggctttttctttggctaggtgtggccttatatggggaggcagtcaaacataggaggtcaaattttgctgggcacccaaaaagaatggcagagcccactacataatacttatatgggctgagcacaatggcacatgcctataatcccaaccctttgggaggtcaaggtgggaggatcacttgagggcaggagttcaagagcagcctgggcaacatagtgagaccccgtctctattaaaaaaaaaaataaaaaaaaaataataataataataattagctgagcatggtggcaagtacctataatcccagcactttggtaggctaaggcaggaggctcatctctggctaggagctcaaggccagcctgtgcaatatagtgagatccctggcttaaaatttttgtttgtttgtttgaggacagagtttcactctgtcacccaggctagaatgcagtggcgtgatctcagctcacggcaacagcgacctcctgggctcaggtgattctcctacttctcagtagctgggactataagtgcgcaccaccacacttggctaatttttgtattttttgtagtaacaaggtttcactatgttgcccaggctggtctcaaacttctgggctcaagtgatcctcccaccttagcctcccaaactgctggccttacaggtatgagccacttgcgcccagctacaaaaatgtttttaaagttagctgggtgtggttgtgcatacttgtagtcctagctactcagaaggctgaggcaggaggatctcttaaacccaggagttcaaggatgcagtgagctatggtcaagccgctacactccagcctgggcaacagggccagaccttgtctttaaagtaataataatagtaatgataatacttaaatgtaagtgtattgtaattatgaaagtgtaattcttctgattataacacggtacatgggtgagaggtgacgcgttgtaatggttaagcttgggcagcagcctgggagctgactgcctaggttagagtcatatctctttccctcggctagcctttcaaacttgaccatggctcgaacttcattatgccccagtttcctcctttgtaaaatggggatcaaaatagaacacccctcatgggttgggctgaggatgggatgagttaacagacataaggcttagaaccatatctagctcattgtatttgctatgtagttgtttgctcttctcatttttccaatcttttattataaaaattttaaaacatacagaaaagtaaaaagggttgtatagcaagcatccatctagtcactacctatgatttcaccctgcacatttttttttttttttttttgcgcatggagtcttgttctgtcacccaggctggagtgcagtggtgtgatctcggctcactctaacctctgcctcctaggttcaagtgattctcctgcctcagtttcccaagtagttgggactacaggcatgcaccaccacgcccagctactttttgtattttttagtagagatggggtttccctatgtggtggctagggttgtctggaactcctgacctcaggtgacctgtgtacctcgtcctcccaaagtgctcagattacaggcatgagccaccaygcatggcccctgaacatttactctgtttgctttgtcacatctgtctatgcctctttccaattattaatgcatgttaattttaatgcatttcaaagtaatggcaaatgcatacatatgttgctattattttttwaaaaagaaactgtcaactgttaaaatggtctgggcatggtggctcacgcctgtaatcccagcactttgggaggtcaaggtaggcggatcacctgaggtcaggagttcaagaccagcctggccaacatgggaatatcctgtctctactaaaaacacaaaaattagcctggtgtgatggcatgctcctatagtcccaggtactcgggaggctgaggcatgagaatcgcttgatcctggtaggtggaggttacagtgagccaagattgcatcactgcattccagcctgggcaatagagtgagactccrtctcaaaaaaaaaaaaagtgtataaaattgtctgtattttcctttaacataaggaacagagtcctatagatgaaacagaatcattaggttgaggggagagtgaaaaggcaggccaagggacttcctgacaatgggaaaagcctgagcaaaagaatacaccactgcaatatccccccaagtccccaaggctggctgatcaggcagagccccttcaaatgggcattaaaaatacttgctaatcccaaggttttgggtggccaaggcaggaggatcacttgaggccaggagtttaagatcagcctcagcaacatagtgaaacctcacctctacaaacaaatttttaattagcgggaatggtagcacatgcctgtagtcccagctactcaggagactgaggcaggaggatcccttaagcccaggagttaaaggctgcagtgagatatgatcatgccactgtattctagcctgggcaacagagtgagaccctgtctcttaaaaayaattaaatcaacaaaaaataagataaaatacaaaagataaaaatacttgcttgctcagatttgatttagaggagactgaagaagaggccttacagaaggcaaagaaggaaagttccagatgggagaacccagcctctcctccactgccgcagatgattctgctgtagcccagatttgcaagctccactcagcaaaataatctccctgtatcagtcatccattgctgcataacagatgactccaaaatgcagtggcctaaagcaacaataactcagattttctcatggtttctgtgggtcgggtatttgggagtggctgggaagttccagctctctgcaaggtctcttgtccagctgcaggtggatgccaacttgggctggggccatctccaaggtgtcctccctctcacggcctgtgcctgggctgggaagatgtgagcagaggtgaactttacaggtgaggctccccgggcacctctccagcatggtgaggtcagggtagctggtcttctaacgtcatcttggggctcctaagttgtgtgcctcaagccaggcagaagctgtcacacattgtcccttttactacattytattgaggcagctataaaaagttacaaagggggccgggtgtggtggctcatgcctgtaatcccagcactttgggaggctgaggtgggtggatcacctgaggtctggagttcgagaccagcctggccaacatggtgaaaccccatctctactaaaaatagaaaaattagctgggcgtggtggcaggcacttgtaatctcagctactcgggaggctgaggcatgagagtcgcttgaacccaggagtcggaggtttcagtgagccaagattttgccactgcactccagcctgggcgacagagagactctgtctcaaaaaacaaaaacaaaaacaaacaaaaaatagttacgaagttctgaggctgggtgcagtggttcaagcctgtaatcccagcactttgggaggctgaggcaggaggattgcttaagcccaggagttcgagaccagcctgggtaacatggtgagaccccatttctataaaaaatttaaaaaattagccaggtgtgatggtgtgagcctgtatccctagctactccggaggctgagtgggaggattgctggagcccaggaggtcgaggctggagtaagctgtgattgattgagccactgtactgcaccctgggggacagagtgagatcctgtctcaaaataaataaataaataagtaataaaaagtgaaaagttacaaagatctggcagattcaaggaaaggaaacctggaccccatctctccatggacgaatgtcaatgtgacagtgtagaagagcatgtgggatggaggaagaatcaggggatgtgtctttggaaagtgcaattgcccacagctggcatctgaatagattcactctcctcaaagrcacttttgcgacaytgatcactggccaagcrtgccccgtgcaggtctcaccctccagcccatgcagttgtctttcagccacaggctgaacactggccatcccagctgtgtcagaggactttggcaagcctaattttctccatcttttttattaccttgtggaccaggttgaacagtgtcccccaaatttatgtccagctggaacctcagaacatagctgtatttggaaagagggtctttgcagatgtaatcaagttratatgtggtcatactgcattagggtacatcctaaattgatgaggctgggtgtggtggttcaatcccgtaatcccagtactttgggaggcctaagtgggcagatcacttgagctcaggagttcgagaccagcctggacaaaactgagaccctgtctctacaaaaaatataaaaaattagccgggcatagtagtgtgcacctgtggtcccagctactcrggaggctgaggtgggagcattggtttagcctagaggtgaaggccgcagtgaaccgtgatcaccccattgcactccagcctgggtgacagagtgagatgagacactgtccccccacaaaaaaaataaatcaatgactggtgtgtcataagaagagggacatttggacacagagacatgcacagagggaagatgatatgaaggcaacacagcgacacacagggagagcaccatgtgacaactgaggcagaggatggggagaggcatctgcaaaccagaacacacaaaagattcccagcaaccacccaaagcttggagagaggcatgggacaatctcccgcagagcctccggaagaaagcaaccatgccggccaggtgtggaggctcatgcctgtaattccagcactttgggaggcccaggagggcagatcacttgaggtcaggagttcaagaccagcctgggctacatgatgaaaccctgtttctacataaaatacaaaaattagctgggcgtcatgatgggcacctgtaatcccagctacccgggaggctgaggcaggagaattgcttggacccgagaagcagaggttgctgtgagctgaggtggtgctagtgccctccagcctgggtgacagagtgagatgagacactgtccccccacaaaaaaaataaatcaatgactggtgtgtcataagaagagggacatttggacacagagacatgcacagagggaagatgatatgaaggcaacacagcgacacacagggagagcaccatgtgacaactgaggcagaggatggggagaggcatctgcaaaccagaacacacaaaagattcccagcaaccacccaaagcttggagagaggcatgggacaatctcccgcagagcctccggaagaaagcaaccatgccggccaggtgtggaggctcatgcctgtaattccagcactttgggaggcccaggagggcagatcacttgaggtcaggagttcaagaccagcctgggctacatgatgaaaccctgtttctacataaaatacaaaaattagctgggcgtcatgatgggcacctgtaatcccagctacccgggaggctgaggcaggagaattgcttggacccgagaagcagaggttgctgtgagctgaggtggtgctagtgccctccagcctggatgacagagtgagactcggtctcaataaataaataaataataaagaagaaaccaacccttttgaccccggggtctcagacttttagccaccacatcagcgagttatggtgtttgttatagcagctctgggaaactaatgcatgttttcagtgacattttagccccttctgaatggtctggatggctggttgacagctaagttcagacccgatgcaaaagcscagtctatgtaggaatgtcccctgtggacagctgctgtgtagccaaggtgggttacatactaggaaagggccctgggggcccccacagggagctaactctattgacgggggacccaggtaacagatgcaggcatttgctgtgagtcacaagacactgatgtgtgtttgcttgcttgggtatttttttactttttgttttttaactttgtaaatgaggcttagccttcccaggtgtgtcctacctcttctgtctcctgtctcccatctctgtgtcctgtctcctggagctggtttgattttgtcaacatgggcactgtttatgatggcaacagctgtgacctttagagtcaagaggaaatccacctacagggactcaggcctttctctccaagtggggccataaactgttattcaccaaaacatgggggaggcataggagggaaacacagcckctcctaggggaagccactctgtttctcctctgcagggctggagacacaggtggacacctggctgtgcccccaaccctgccctcaagctctgcaccattttgtaaccctcaaaagcaatcaggcctctgtacttgctgagcccactgcctgagaagtccattttccaggccctcacttagccagcgcctcctcctcctcctcttcctcctcctcctcaggtcaccctcctccaagaagcctttgtgaccaccacacaaaaacccagcccttcctcccccattatattcatctgctctgctaaagtgctcaccccactggaaatgatcttgtttatgtgtttccttgtttactgtctgtcttcagtagaatggaagagccatcggtattttgtctttttttccccttgtccattcttatatcctcagcttctagaacattccctggaacacagcaagtgttcagtattgttcatggagtgacagatgtctcagccaagaaggtacaatcacagggaagaatgacttcaactggtcttgacttcaacctgcttccagcctggttcccttctcccacctccctacagcccacagaagatcttttccaaactggaagtctgtccaggtcattcttctgctctaaggctttcagtagctcccccttatccccaggaggaagtccaaatgccttaacaagtgtcaaggaacacttggtgagccctgctttccttgctagtcactcgtgcacagctgagtctttccccagagtggatgtcattcatgctgttcccattgcctggattcctgctcctctccaccccattcaactgataaactcgtggtttttttttttttttttttttttttgagactgagtctcgatctatcacccacgctggagtgcagtggtgcaatctcggctcactgcaacttctgcttcctgggttcaagagattcttgtgcctcagcctcccgaatagctggggttacgggcgtctgccaacatgcctggctaatttttgtatttttaatagagatggggtttcaccatgttggccaggctcttctcaaactcctgacctaaagggatccccccgccttggcctaccaaagtgctggaattacaggcgtgaaccactgtgcctggcctcaactgatacactcttgtccttttactaggctcagcttagggaccgtcacctccaggaagccttcccaacctgcactgatcacttcttcttcttctctttgggattatcacttgtattgtaataaaatcttgttttttttctttaaaaaatattatttgcattcagcaaaattcaccctttttgatatacagttctgaggttttttttagttctataagttttgtcaaatatgtaaagttgtaatctccaacacaatcaaaatataaaacaatttcctcacccctccccaattcccttatgctcttttgtatccaacacttcttcccactccagcccctggcaaccacggatttgctttctgtctgtacaacactgcctcttccagaatgtcatatataaaatcacgctgtttataacctttaatgctggtgtcttttktggggggagtcggtgagggagtgggacgaagttttgctcttgttgcctaggctggagctcaatggcacaatctcagctcactgcaacctctacctccagggttcaagcgattctccttcctcagcctcctgagtagctgggattacaggcacccgccaccatgcccacctagtttttgtatatttagtacagatggggtttcaccatgttgaccaggctggtcttgaacttctgacccacctcggcctccaaaagtgctgggattataggcgtgagccaccatgcccggcctaatgctggtgtctttcactcagcttagtcatgcatttgagattcagccttggtcttgtgtgtatcaataattactttttatagccgagtgctacttcactgtatgaatgtttgtttatccagtcacaaatgaaggacatttgggttgtttccagtttgcagtgattatgaatgaaactactgtaaacattagtgtttttctgtggacatatgttttcatatctcttaggtaaatacaggtgagtttgctgggtcatatggtaagtgaatgtttaactttttaaagaaactgcccagctgttttccaacgaggctgcactgttttgcatttccaccagtggatccacatcctcaccagcactcggtgttatcctcagtttttttttttttttttttttttttttcccgagatggagtttcgctcttgttgcccaggctggagtgcaatggtgcgatctcagctcactgcaacctccgcctcccgggttcaagcgaccctcctgcctcagccttccgagtagctgggattacaggtttcccccaccatacctgggaaattttttgtatttttagtagagatggggtttcaccatgttggccacgctggtctccagctcctgacctcaggtgattcatgcacctcggcctcccaaagtactgggattacaggtgtgagccaccgtgcccagcctattgtcagtggttttttattttaaccattttaataggtgcgtattttttgttcaaccagttggtcttccccagcagcctgggactcctgacagagaataaatctttcatctccttatcctcagagcctgtagtagtaactgacatgtggtaggtgctcaagaaatgctgtgggctgattgaatgagtccattcatggaatgaatgaatttcttgactgcatgaatgagggttctattgaaacagtgcttaaggtaagtttgtctcagatgccatgtgagtttctctgctcccccacaaaggaactcaccatgagtgatgagctggtctttctgaaatggttgccgcaggtaaaacccccttaccattacgtctaatatcttcctgtatctgcccaaagtgcccagactgcttctacctctgaacaggcttgcctgggtttcttccctgttgtttcagtgaaaggcactggtgcccatactagagggtgcaagagaatgatagcggcgggcggcagttaaatgcggatccctaggccctgcccctacgttctgattcagtaaggccaataactcccggcgcatctcagacttttctaaggccccccaggagaggtgagagtcctctgtagaagtgtaaataattctaggtcttgaaaaagacatggggccgggcgcggtggctcacgcctgtaatcccagcactttgggaggccgaggcgggcggatcacgaggtcaggagatcgagaccatcccggctaaaaaaacggtgaaaccccgtctctactaaaaatacaaaaaaaaattagccgggcgtagtggcgggcgcctgtagtcccagctacttgggaggctgaggcaggagaatggcgtgaacccgggaggcggagcttgcagtgagcccgagatcccgccactgcactccagcctgggcgacagagcgagactccgtctcaaaaaaaaaaaaaaaaaaaaaaaaaaagaaaaagacatgggccttcagattctagttctgccaccactggtggttcacacctgccggtcgcttaatgcctctgagcctcggttttcttatctgtaaagctgtcctgaaagtaatggagcttcccagttccactgtgaggatgaaatacattgactgcacgaagggccctgatgcaaggtagatattcaataaatgttgtggattttggtaagccaaaaagattccaaatgctttctctccacccccttcgctaactgccttatattttaatttttattgatgcataacaacgcagagaagtgtacagttcactggatcttcacacactgaacacacccacgcccacatcacccacaccccaaccgagaaaccagcacccctcaggactcgcctgggtgctgctcatcaccaccttcccaagggcaaccgttctgactactagcagccttgtttttgaaacagttttagttttctataacaactaagacatgcatagtaaagaatatttagaaaacaatgacaagagaaaagtcagagacatgtgaacatattgaacagcctttaaaaaatattaattttttggcctggtgtggtagcacatgcctgtaatcccagccctttgggaggcttaggtgggagagtcgtttgagctcaggagttcaggaccagcctgggtaacacgatgaaaccttgtctctataaataaatacaaacatctagccaggcttggtgatgtgtgcatgtagtcccaactacttgggaggctgaggtgggaggattgtatgagcccggcggagggggcagaggttgcagtgagctgagattgcgccactgccctcctgcttgggctacagagtgagaccctgtatcaaaataataatactaactttctgttgaggtataacgtgcataaaatggcccagatcaggccgggcgcggtggctcacgcctgttatcccagcactttgcggggccgaggcgggcggatcgtgaggtcaggagatcgagaccatcctggctaacacggtgaaatcccgtctctactaaaaaaacaaaaaattagctgggcgtggttgcaggtgcctgtggtcccagctactcgggaggctgaggcaggagaatggtgtgaacccgggaggtggagcttgccgtgagccgagattatgcccctgcactccagccttggtgacagagcgagactccatctcaaaaaaaawaaataaawaaataaataaataaaaggcccagatcataagtacagagctcagtacattttcataaagtgactaacccatgtgaccacaagatcaaaacctagaacatcgcagccctcaaggtccttccttctgctgcctccaaggcagtgagattctctattctgacttctttttgtgtgtgagaaaaagtctctttctgttgctcaggctggagtacactggtgttgtcacagctcactgcagccttaaacgcctgtgctcaagggatcctcccatctcagcctcccaagtagccaggactmttctgacttctaaaagcactgatgagttttgtgaaacacagccttgttttagacaaagcttccctctctctggtgctgttggagaactcttgctcatccctcaggacccagttctgaggttacctcctctgagaagtcttcgcagctccatgaggcagaggattagcccttgcctgatttgtccctctaattcagctcttgccattctgtgatagtaaatgcctcttcctgctgtctccccattgagaggtaaataggtctaatctatttgcctaatatagggtacagtgggttgaattgtgaccccccccaaccccccacccaaaaaaaacaacaacaaaaaaactaagtcctaaaccctgcacctgtgaatgtaaccttacttggaaataaggtttgtttttgtttttgtttgcttgtttgtttgtttttttgagttggagtctctctctcttgcccaagctggagtgccagggcaggatctccgctcactgcaacctccacctcctgggctcaaatgattctcctgcctcagcttcccaactagctgggactacaggctgtgcctctacgcctggctactttttgtatttttagtagagacggggtttcaccatgttggccaggctggtcttaaactcctggccttaagtgatctgcccacttcggcctcccaaagtgctgggattacaggtgtgagccactggtgcaaggctggaaatagggtctttatggaggtaattaagttaaggatctcaagatgagaacatcctggattcagggtggacactcaatcagaggactggtgttcttaccagagaaaggagaggggtatttgagacagagagcagagggccatgagaagacagaggcagagttagagtgatgcagctccaagccaaggagcgcaggatcaccaccaaccacagaacccgggagaaaggcgtggggcagattctcacctagggcctaaggagggaaccagtgctgctgctggcaccttgcattcagacttctggcctccagaactgtgagatgatatatctctatttttttttaagtcaccaagttcatggtaatttgttacggcagcctttggaaggtaagacacggggcctggtattaaataagggctcagtgtttgtccaatgaatgaaaggggccaggcacggtggctcacgcctataatcccagcactttgggaggccgaggtgggtggatcacctgaggtcaggagttcaagaccagcctggccaacatggtgaaaccctgtttctactaaaaatacaaaaaaaaaaaaaaaagctgggtgtggtggtgcatgcctgtaatcccagctactcgggaggctgaggcaggataaccagggaggtggaggttgcagtgagccaagatcatgccactgtgctccagcctgggcaatagagtgagactccatctccaaaaaaaaagaatgactgaaaaggctaagaaaggaagcttggcttgctggtctgtggtgggaacaaaagggagaccttcggatgccttcttgctctgtgccagctgcctggtgcagcctatgaccactgcaggaccctgcagactgcctgcctgacaccatctccccttgcccctgccgacagctgccctgtttggccacatactcttgggcatcctctcatgatgtgggggaagctgatccatcctaaatatactgccaaatgtggaaaatcccattttcttggagagtgactgaggcagagcaggctttgtgacccatttctggccaatgagacagagggaaagcatgctgggtgtgggggggcgttgggaaaaggtgtactcttttcagtctcttccctttcaggtctggttgccaggagtggcagatgtggaaataatcggtgtccctgttgacacacttgaacttctcagtgtaccttgtctgcaccccaaccactcctgggcttccagcaatgtgagatcattgatagcctttttgtggaagctgaatacgtcctagkggagactccagacatgagaacgaggggcttttgtcttcagcagtgcagattgggaaactgaggctcagagactattacattgttggagacacaggggggtaagaggcagagctgggattcacactgaggcccacctgtctctgtgtcccatgttttcagctgctcttgtacactattgctcttggctttcaactggctgtcttgattttacatgaggtttggggcctggcaaatgcctggttgcagtctggttcttagcataacagggtccgcatgttgagagttcattgcaatgtagtgactactgagtcagctccaggggtcccatctaaccaggatccatgcccaggacttggatatgcgttcgcagactcactcctccacagcagccctatttaccaaagaagaaagtgaagcttacagcggctgcaaatgctgtgcagagctacagagagtgagcgactgggactggaaccagctctgtctcactccaaagccccctttttgtgttcctccaactacactctgtgcccatcatgcaggactttgatggttgctgctatatccctggagcctgggagtgcctggccccttgcaggcactccgcaaatgtttgttgaatgaataaatgagctccaccaggactccaggttagaggtgctcaaagcaaaaccatgggtcgggcacagtgacttatgcctgtaatcctagcactttgggaagctgaggtgggtggactgccagagctcaggagtttgagatcagcctgggtaacacggtgaaatcccgtctctactaaaaatacaaaaaaaaaaaaaaaaaaaaaaaaaaagccaggcgtggtgatgcacgcctgtagtcccaactactcaggaggctaaggcacaagaatcacttgagcccaggaggcagaggttgcagtgagctgagatccaaccactgcactccagcctgggcagtaaaaaaaacaaaacaaaacaaaacccacaaaaccattaaaccgggggctccaccaagctggccacaatttaaatagcagaggggtctgccctcccctacctccagaagcagtgaggcctaaccccattgaaagcccattctgggtggtacttcctctcacagaggcctgccagccagcagctgggactcggctcgtcgccacggatgtgtgcttctctgaacaatgttgggaaaggaaactagactcaagggctccagggggttttctggtcattttggctgtgggggtagaggggtagggttggcgaggttccctggggcagggcggtggacctcagcctggtcactgcctttggaggtggtggtggaggaggggaaaggaggtctgggtttgaaataaccctctaagggtgtttttttttttttggtcagggtcttactctgttgcccaggctggaatgcagtggcacatgatctcggctcactgcctgcaacctctgcctcctgggcttaagtgatcctcttgcctcagcttcccgagtagctgtgactcaggctcactccaccaggcctggctaatttttaaagttttttgtagagatggaggtctcatcatgttgtccaggctagtcttgaactcctgggctcaagtggtccaccctccttagcctcccaaatagctgagattacaggtatgagccaatgtgcccagtccacagatatttttcaaaacagctttcttgagatataattcacatcccatgcaactcatgcatgtaaagtgtacagtacagaggcttcagcacattcacagagctgagcagccatcgtcacaatccattttagaacattcttatcatcccaaagagcagccctgtaycccttatcttttaccttccgataggcccgctctctgctttcctggtccttggcaaccactgatctacgttctgtctctgtagatttgctaattctgcatatgctataggtgggtcttatgatggggaaattaagtccaaagagggtggctgagcagcccacagccataaaactaaggaaggggcagacttggaactggagcccagattccttgtttccaagttcatgctttcacaggaggtcttcttcttcccagtaacaattcctaaaatagtcagccttggttttgccccatggggatgagggctttacctccctcatctcacagtccccctcagatgtaggtacatttctgatacccataggtataataatgaggaaactgatacccagagaggctaatggtccaatgcaccatggctgccagcaaagagaagagggtaatagggaaaagcatttgtatgcccaaggactggtgagcaacacagaatacaaagagtcaagatgattcagcttaaaatgtaattttctttcaggttattctttcttacctatccacttccctttttctttcttttgtaggaaaaggaaaagaaagatccctctaccctttgaggtcacttcctgacccatttgtgcatctatgtagagtggttacaaactcacatctccctgcctgaatgcctcttattaatctggggatgggtggcaggtcagcatgcccatgggctctgacaccagacaggctgaggttcaaatccagcccccaccacccactgacttaacccactctagccctctgacagctaacctgtgacagggcctttctacctcatatgtctgaacccacagagtggtttctttctctctctctctctctttctttctttttttccttctttcttttttgttttttttgacggagtctcactctgttgcccaggctagagtgcagtggtacaatctcggctcactgcaagctccacctcctgggttcaggccattctcctgcctcagcctcctgagtaggtgggattataggcacccaccaccaggccaggctaatgtttttgtattttcagtagagacgggttttcaccatgttaagcaggatggtcttgatcttccaacctcgtgatccgcccgcctcagcctcccagggtgctgggattacaggcgtgagccaccgcgcccggctcagagtggtttctttccctacctattttattccatggaaaagaaagaatacacagaatggttccttccccacctattatccttgggaaaagaagtgtcattttacattagagtcctcccagaacagcgcctgccgccttgatgatgacgacgattgttaattctgagatggagtcttgatctatcayctatgctggagtgcagtggcaccatcttggctcactgcaacctctgcctcctgggttcaaacgattctcctacctcagactcgtgagtagctgacactacaggtgtgtgccaccatgcctgggtaatttttgtatttttagtagagagggggttttactatgttggccaggctagtcgtgaactcctgatctcaggtaagccgcctgccttggccttccaaagtgctgggattacaggcatgagccactgcacctggcagattatttttattttgaacaaccaagttagagtttgagaaagagatgaagagcccccagtactctctttcaatccactgattccttcagttgttcacctggggggtggggttgggctaggggttggttagcaaaaaatgagccaaagaagaaaatgaattaaaaacatgaaagaaaaaaaagcaaactgccatttatgatgaccattatctcacacacagtggacattttaactcaaaaatactataggctcacaggcatagattaaacagaaacctgttcttcatgttcttatttttttgcttgcttcccacagatgagagaaaaatccagccagaattggcatctgtcaagataggcttttaggagccacggctccctagagtggtctccacacattctgattatatgcaatctcattttgccatcaagagacttaacccactcccctatccatgtagactttgtaataataaattatacatatatatgactgaactaatatattatgtactttatataacacatactaaaacaaaagtgtgaaaaagattggttgaaataaatacaagctgaagttctaaaaaaaaaaaaaaaaaaaaagtgaggcaaaggaattgcccctagatgtagtcatttttcctggggaattggcccmatgacttcaagtggttgatgtcataatgagtccttccaagatctctttaaaaaattgatgtgttaagtgatctgtggtgatgagcacagstatacacgccagttgggagtgctgaaagaaatgaatccacagatcttgtgaagtcacaaacgagtcctatggcttgggatacaacattgacagtgagagtgatattcctcaattaaaaaacgctataacaggccgggtgcagtggctcatgcctgtaatcccagcactttgggaggccaaggtgggtggatcacttgaggtcaggagtttgagaccaatctggccaacatagtgaaaccgcgtctctagtaaaaatacaaaaaattagccaagcatgatggcatacacctataatcccagctactcaggaggctgaggcaggagaatcgcttaaacctgggaggtggaggttgcagtgagccgagatcgtgccactgcactccagcctgggcaagagagcaagactttgtctcaaaaaaaaaaaaaaacaaaaaaaaaacaaaaaaaaaaacaaaaaaaaccaaaaacacacacacacaaaaaaaacgctataacagaccagtggcacatgcctgtgatcccagtgctttgggaggtagaggcaggaggattgcttgaggtcaggagttcaagaacagcctgggacacatagtgagacctcatgtcgaaaaaagagaaaattagccaagtgtggtgtgcctctatagtcccagctcttcaggaggcagaagcaggaggatcgcttgagtcccggagttcgaggatgtggtgagctatgatggcaccactgcactccagcctgggtgacagagtgagaccctgcctcttagaaaacagaagctataactcaagcaacttggargtgaaattcaagtgcctgacagctgtctaggtgcccctgaarctgcctctagtcacaacaaagatacctccatyaaagagcataggaagsgtttgaatcagatagcttcatgcaacacacgaacggaaaaataaatttcttaaagaacatattagcttcttcccatgagatcaggaaaacgggacatcaattgtctggggttctttgctcctgactccctttggggctggcactatgttgatcacgttttacagatggggaaactgaggctgtcggtttttaagtggtctgcctaaggtagcagtaagggttggtctgactccagcgcagcctcaacgagggcttcaaattagggccatgaattggcaattcctggcgggtaattgtgaagagtatatttatttttaatttttatttatttatttttgagacggagtgtctctcggccacacccatcctagctcattgctgtctcgaactctcgagctcagacgatcctcccgtctaggcttcccaaagagctgggatgacaggcgtgagcycgggcgcccggccgggagtgtgttaagtatacggcaaacacctggactgcggccggctctccaggaatgccatgatattggggaattccctttgcacctggccaagtggcctcgggcaggtagcctcccctcgggttgcctcagtttcttstttggcacgcagaggcggggctccaggcctgggccgctccatggcggggagggcgcggggacgctgcrctcggggtgcgctccgagaggcggacccggctgggcgcgcctggggcggggcgaggcggggcgaggctgggcggtgcggggggcggcccccgaggatcacgtggcgcggcgccgcggccgaagcagaagtagcgagcgccggcggcggagggcgtgagcggcgctgagtgacccgagtcgggacgcgggctgcgcgcgcgggaccccggagcccaaacccggggcaggcgggcagctgtgcccgggcggcacggccaggtgagctgcccggccgggagcgaggcaggcagggcgcccagggacctgcgccccgcggggaccggctcccagggcgctgcgtccgagggggtctgcgtcctggctcagccggagcgggcagggacggggcgcaccctcggggaccccggcccgccgtgcccggggtccgtttggtgacggcagggatcctggcccagccgctggccacttcctcaccccgggccggcgccacctctccggtccgtgcggtggggcggccccagctttgaatggggaccgggaggaaggtcaggggtcgtgtgggggctggcgttcaaaactcctcttttcgagcggctctgcgtggggtggcgccgtctctcytgacsgcccttgtgcccagagctcgcggacgctcggagccacacttccctgtctcacttcggtggttgcgggtggcgggtgggagcgataccgcgggaggcgcagtccttcccggagacttttggagagcttgcaggacactcgcgatgcccgctccgcaactgtctgcgtaattatgcgtgtgtctgtgcgtgttgtgttttgttgtgttttggaatcccaaagagggcattacccgcacagcgcaagagttcaggttaaagacgtgccccgtttggacggggagctcctggattccagcaggacggtggggcggggctstcttggtaccctaatcttgaactagggtgagaaactatggggggcggggtggtaaaggggtgacatggcgcgagggaaacaggtggccttgcccgtcggaacttaatttgaatttcagttccatcagtgggaccctgggcaagttgaagaacctttttgagtctgtttccccctctggatactggagccacccaattttccagggctgtgtcgagaattggggcttattgctgttccacgaggttcgctgagaatcggggcgcatccatggagagtccttgggcagttcctgactctctggttcaagggcattctctggggcatgggccctcgtccttgrctacagttctgcggggaagttttacagaattttgaagtctatgccagcctcaagcagtttctcttgcaaaggtgtgtgtgcagtcacgtgtataccagctcagggacaatcgtcattgtgagcctcactgatgtktaagtcacctaatgatgcagctgccttcccccaccagcgactggagtatgggcagttcctctggaagwggaaaagcacagaccccatgaatagcccttttgcactcattgggtagagtcaatgaaaagctgctggtgagaaaacttttgaaaacayttcttggtcaggcacggtggctcacacctgtaatcccagcactttgggaggccgagctgggctgatcacttgaggtcaagcgttccagaccagcctcaccaacatggtgaaaccccatctctactaaaactacaaaaattacctgggcgtggtggtggccgcctgtaatcccagctacycaggaggctgaggcaggagaatcacttgaacccaggaggtggaggttgcagtgaacccagatcatgccactgcactccagcctgggtgacaagagagactccatctcaagacaaacaaacaaacaaacaaacacacacaaacacttcttaatttagaaaacagcaagaacacaaagagaaaaatttgcccgttacatcatcagttaatataaataaagtcaagttgtatcctctaccctctcccagcctccgataaatagtaaccactctcctggatttaccagaagatcacctttataaaaagggaattgtattatactcatacagttgcaactattgtctgaagctatttttttattgacctcacaaatctttccagatcaaattgcttatctatcatcctcattctttctgatggctactgagcgttcttcagtgcatgtgcaccattatttatccaggaggccccccacattgatgagcagttgttttctgtttttttttctttttttgtatttctattgcaactattgcttccgtgattttctgtcgtacatattgcatctttgtgcatgtctttctttacatgtacaattgcaggatcgaagcatatgcgtgttttgctttttagtagctgctcacaggttgccctaaaggagcaggggtggaatttacactctcacttgcagtggctgacaccattcctttgaaaatagtgtattccctctaatgctgcagggtgggtgtaaggtgcagcagtaatgtcccttgaactgttggaggggcscttaccactcaagtatttgcctgtgctccattttaacacaattgtcttgtgggatttttggatgaaatcctgtactggcttaccatgcacagagcactgaagagacaaaaacttccttgatttctggttttgggtcctcgcatctcatttcatgtcctttccccccmccccgcccccgagacggagtcttgctctgtcgcccaggctggagtgcagtggcgcgatctcggctcactgcaagctccgcctcccgggttcacgcctttctcctgcctcagcctcacgagtagctgggattacaggcatgtgccaccacacccggctaattgttttgtatttttttttagtagagacggggtttcatcgtgttagccaggatggtcttgatctcctgacctcatgatccgcccacctcggcctcccaaagtgctggaattacagtcataagccaccgtgcctggcccattttatgcctttctaaataagcttatgagatacaagaacatgaatgagcttatgagatacaagaaaaacctttagaaggacatgaaatgtaaaaatggcaaaaatcagttattcaaactcagccatatttgtatttacaaaataagtcattttatagaattacccattaagaatgggaaacaggaacaaaaaagggatttcaaggcttttttttttctttttttgaaaaaaccaaaaaaagcagaagcaaaatggaagttgctgtggtggctggtgctctctcctgsgctcaaggtcttggagacctccctgccatagttgataaagcgtggaacgctggagacctgagctgggtgctggcaggatttgaatggtggactccagggatcttttggccgtgaagatctgtttccaattgcatctcataagctcattcatgttcttgtatctcacaagcttatttagaagggcatttcgtgagatacaagaaccccaaaccagaaatcaaggaagtttttctcttcagtgctctgtgcatgttaagccagtacaggatttcatccaaaatcccacaaaacgattctgttaaaatggggcacaggcaaatacttgagtggtaagggcccctccaacagttgaatggacattactgctgcaccttacacccaccctgcagcatcagaggggatacagtgttttcaaaggaacggtgtcagccactgcaggtgagagtgtamattccacccctgctcctttagggcaacctgtgagcagctattacaaagcaattggtgagasgcagcatggaagtctggtgtttatggctgagttgatccactgggcttcgaagctggaagtaactgggaccctggggaaggttaagtccaaggccctcccagagtgagggctggaaagaactgaggagcctggtcccttgtcctggtttctgtytaattgaaggtgttataatggggcttgtgtttcctacttatgttccagtggacaatggcctagagacctgggagtggggaactccaggatgcatggctgggaacagtcaacatagtgaagagctctgtggttggcagctgggtcaaatccagtttcagctacttttttaaaattttattattatattattattatgctttaagttttagggtacatgtgcacaacgtgcaggtttgttacatatatatacacgtgccatgttggtgtgctgcacccattaactcgtttygctactttctatctgtgtgacctcggataagtcccttaacctcttttgagaggggcaagtactggcaaatcagttaatatctggccagatgctgccacaggattctggactaggggcttgggactcaggtgagggttttgatctttgtgctgctgctggtctacatgactttgatcaagtaatgtgacctcttgggatttcagttttccgctgccgyatttcccattgagataaatgagacgaaccagacacaacaggtgcttggcacctggggaagggcccaataaatggctgcttaacaaggatgaaatggrccatgggggcaccttgttcatccctttgtcctggctaatgatcaggaggtcattttgggtttctcctgataaggtaagatgcacattaactctcagcagggtttttttttagcatactctgttctgcctcctagcctttgcttaaacttaaagccagttcctcctgcttcatcttttttgaaagattgagttcagatgcctgcttttttcccctgaaagctttttctgagccctttaagtgcctagccacactccagattaaatttaggrttccttcttgctgctctctgcccgccgtgcccccagtgcatgcttctgctgctgcacttgtaactacattagaattctcagttgattagtctgtttccccatgggyagagagcaggtgtaattatctcctgctgctggcatggctgaccgaggaggtccctttggtatgggtgtgcagtagagggaggtgggggcaaagggcaaatcctgggcccctccccattcccctcatttgcatcctagtccccacctcagtgcctggcatagagttgacatttgattaatgccttccycaatggcygattaatgctaactgagaccctggtaaatgctgcaggctgtgcatacattgtagctttttgtcttcccagctgccccttgtgggcatttaacctccattttacagatgagggaaccgagccacagatttagagcagcttggcagaaggctgagcccggctggaagcacagacagccctggctgaacaccagcctctcactcctccttstttggatcctgggagggtctctctagtgctactctgtaaccttgagagctacagagtaacaactccaggcacctccagggacttggagggaaaggaggagataagaaacagaacaaataatggtaattttaacaatagcttaatctaaggagtgctgactttgtatcattgttttaagggcctgagatacattatcttgtttaagccttacaaaaacatttagatggtggatactgttaccttcttttatgggactggaaatgagcccagaggatctaagtgacttcttgcagcctagctggcaagggggtccctggtggttcasctccagggcctggggagcsccttcactctaagtcctattttgggggcaggcaatgtgtttctggggatttgggaggcagaatragggratggtacagagtgagggctcagggagggactaagggattttgagcagaggagtgacatgatttgattcatgttctaaaaggatccttctggctmtgcatctgagaattgaccctagcaggtcagggaagaagtggggagagcaggattagaatagttcaagtatgagatcctaggaggagccggtgaaagggtgagatgcgttggaagtggtcgtgagagagtccacgcaaggattcctccaaggttttgggcccaagcacctctctgacactgaccacccacaagcataaacagcaatcmaggacacctsctaggtgctggccgtcacccmaggtgctttgctggggcatttctgaacactcccattttaaaaaggctaaaactgaggcacagagaggtcaagcagtctacccagagcyacacagtcagcaggaaccttctctagggtttgaacgtgaagctgccaagacctgacatttcctgcctttcatcctcatttctatgcagaggaaccatttgccaaagtctccatggatgattctgaaggtttagtttgtttttcgtttatttcattttttttttttttttgttcttaattttgctcaggaataaagagatggttagaaatctctagacaggatagagaaggatgttggagattaggggtgagaggtgggagccaggctgggctgctttggctattcaaatattctttaggataagagtgggtggggagagaggggactcactgccaggtcagggtgatttggttattcaaagcccacgtaacggttgggtccttgaggtcaggggctcttctcacacttcagtttccatttaaacctttgtgtcctgccttagctctctgagtggccagcgatgccttgccactagaaccttctcctaaaactcatcctgattgacatgagacaggattttggttcctgaagttcatgscctgttaactaaacccctttcagtactaaaatcagttcactctttmattctgccctttcagcttcctgatttctcccgattccttccttctccctggagcggccgacaatgtccaccacggtcaatgtagattcccttgcggaatatgagaagagccagatcaagagagccctggagctggggacggtgatgactgtgttcagcttccgcaagtccacccccgagcggagaaccgtccaggtgatcatggagacgcggcaggtggcctggagcaagaccgcygacaagatcgagggcttctgtgagtactcgctgggtggggcagtgtggcccrtcctctggggccctggcctgagcacctgtccaccttcctgtcttgtcattactgtgattgttgttggtttgatgtgttcttttattcgtcttaaaatgaaagcattgccagtttgtgtggatctctgatgaggtttacaccaggtggaggaagttcagctgggaaaactctggtgaaagaactgaagctgaggtcagccaacatggaaatggcattcaggcagctctccttgcctggtggttctgtgccctgtctgacagcatcagggatcgtctggttcccacaactggtcgagtcatctttcctcttaagggcgaattagcccaagcctgcagaaactcatagcttggtcgccaaatgctaccttgttttactgcataccatagcagtgaggggcctttgctttagtctccaagcagggagagtgagttgttgaacgttttgtagctttcaaatgcaggtctggtcttggtagaggtgtccctcctcccctacctccgttwgattgggcagctggttcagatcctaaagtttctaagactgtttttaacaaatagagtaaaggcacttaagcaattttcagttgcaaatatttgctctaatttgtgtttttaaattaactagtttttaattgaaatatatattcctgggggttaaggagtcaamtcaaatatttctcctccctaaaccatcctrctgaggcaagctcattaccagttacttttatcttccaaaatagtctatgcttgcataatgtgtgggyttaaaaagaaaacaattgggaactcttgtacacttctgcaccttgacttctttttgttaattaataatgatgttggcggtggtttcttatcagcacacattgatctcattctttcttggacacaygacatgtaatggcgcaggcctcartgtaacagtttaactccagagaagggcatttcatgctatttccaggcttttgttattattcgaagtgactatcattgtactcttttttttttaaaacaaaattaatttttttgagacaaggtctctttcttttacccaggctggagtgcaatggcatgatcatggctcactgcagcctcagccccctgggctcaagtgatcttcctgcctcagtctcccaagtagctgggaccatgggaatgcaccgccatgcctggataatttaattttttttttttttttttgtagagatgggatctcactatgtccaggcttgtctccaattcctgtgctcaagtgatcctccctccttggcctcccaaagcattgggattacaggcatgagccacctcacccagccttgcactctttttttttttttttataatagattgattgagacataattcacatagtatacatagaattcayccattgtatgcagcatgtatagtgtggtggttttagtatatttatataaatgtgcaagcaccactccmatcaaaagtakaacctttatatcacctcaagatgaaaccccatacctttcaccatcaccccatcccctcatcccccctaccagacgtaagcaaccgttaaatttaattctgtttctataaacctctctattctggacatttcatagaaatggatcctatgtatgtgggcttttgtgactggcttctttgactcagcatttttcaaggttcatccactttgttgcgtggatcagaaattttcctttttgtggcagaatcatgatacgttgtatgggtattccacagtttattcagtcatctgttgacggacccttgggttgttgccaccttttggctaatataaatagtgctgctaagaatgtttctctacaagtttttgtgtggatgtctgtttttatttsttttgggtatatacctaggagtggaattgctgggtcatacactaactcagtttcatcattttaggaactgtcagactgttttctaaagtggctgcaccatttatattccttccagtggtagaaaagggtgatcgttgcattattcttcatttgtatatatgggtatatctgaaggacagcttcctgaaggtttatttctgagctgaaggatatggcatatatatattttaatagacagagtctcgctctgttgcccaggctggagtgcagtagtacaatgtcagctcactgcaagctccgcctcccggattcatgccattctcctgcctcagcctcccgagtagctgggactacaggcgccygccaccacgcccggctaattttttgtatttttagtagagacggggtctcactgtgttaggcaggatgggggtatggcatattttaactttaaagggaagtttggcagcaccccacaaaagaggttgcccccactgtctgtttcagccacaggatgtaaaagtacctgttgcctgaaccctcatctatgctgcgtggctgctgaacttggccatccacaggtagactttggtagcttggtgtcatccttaatttgatgtatcctatcatgagtgtgatcaaactgctttctgaaaggcttttcctggttttggagcccagtgggtctcttgtggcacagagccagagccctgctttggaactgcccatgtggaggtggccatcttccctcttgactgtttgcattggccggctccacccccaggtggcccagaaacctgttgcagctggggtggccaccctcccttcccccacaaggggtgagagggttggcactgatggtaaatacagatgggccacgttgagactggactgcaggttgttcctttctcttctcaacctgcccatcccaaacctagctgcccatcagaaacacccaggggggatcttgtaagtatagggtattaaccatggcatgtgtatacacctgtgtaacaaacctgcatgctcttcacrtgtatcccggaacttaaagtaaaataaaataaaataaatatatacaaaaaagaaattacagggtattagaaccttcttctgaagctcattgtgatgggcatgagacaggattttggcttgaaatctatgccctgtcattctccccttctgctgagtaataccatttcactcgcttacgcggatgcgctctctcgctctctgttttagagacagggtcttgctctgttgcccaggctagagagcaatggcctgatcatggttcactatagttgtgaactcctgggctcaagtgatcctcctgcccagtctcccaagtagctgagactacaggtgagtgccaccatgcctggctgattttttaacttttgtgtagatagggtcttgctatgttgccgaggctggtctccaactcctggcctcaagtgatcctcccaccttggtctccgaaagtgctgggattacagacaggaactaccatgcccggcctcaattcattcttttatttatctgttcagcctctttatttccttcttctttctccctggagagaccaagaatgatgatatttcaccactttggctggggcgtattattataataagtcccycggatggtctgataaytaggcaggtttcacacatatgccactggagagacactgcccttcctccaccttccccctcctctccctcctcttctccctcccactttccctttctttctccttcccttcccacctttgcccccccyccattgcctcccctctgtcatttggatgcccactgtaggcgccgccctaggcgctagagatacagcagttattaaattggattcaaatctccgtggagcctatattgctttattaggtatgagcagtctggggcttgacttccagtgcccttggatgagctttgctgtgtgatcttgggcaagttacctccactctctgaactttaattcccttatctgtggactggaaataacattggtgtctaccctacaggctcatggttgggaagaagcaaatgagaagatgcattggagaggctcggctgaattcatagtgtgtgacaggcactcagttgttgggaaccaccactttcaggatgtttgctgttgttgctaactagtggagtccagcctatgtagtcttccttaggggtttggactggaggggagtagggtccattctcaggttttcagaagagggatgacgtgattggatttgcatctttgagcatgcagtggaggtcctgtttgcaatgatggtgttggtaaagtgacagggaaagccaattatgtgtgaagagcttagaaatggtgcttctccctcacaccttgagagagcaggccttcaggccctgggtggggaytgtcagtgtcaccgctcagtctcctgctgagaagggtgacgttttatctcaagaagaactcccagctctggcaatttcctcacggggttctggttagcaggaacttgstggttactgtggggtctgcaggggcaggtgcacatgagaggagcaccggcacctggttttggaatagttggcaaatggtgtgtgacttttggacaggtgttacaatccctgtgcagacctgggtaaaatacctaggtcctactgtctaaagcagcgtgtggttctcaaccagggtgatttttgcctccccctccctactccagggtagggggcatttggcaaagtctggagacgtgttgattttctcacctgggatacagggtgctactggcatctagtgtgtagaggccagagaggctgttaaatgttctatagtgcacaggacagtccgcaccacagagagtgatccagcaaacgtgtcagtggtgcaggggttgagaaactgctctagagtcatgtgtttgctttgctcacagcaataaaatgtcactgggtaaaatagggttttgctctgaaccctgtttggatggaactttctcatttgttcagcacatgtttgccatcatattgagtgctaaactctgcagagagagggaggaggaggatggagtcccagcttgcaagagggggagacagactcaaacttgcccttgcaagattgtgtgcttagtaccatagcaggagttttcactggatgtggtgtgaggagggaaggtttttgtccatttggatgtgggggaggtggtgaggaatggggagggctcattgtggaggagctgcttgggtggagtttagagagatttgctagatggttagcagggatggctgccctgatcctgtgggattaatgggtgtcatgtaatataaacaagcagatttgtgggtcatagatctgggcagagctcagctgggcaattcttctactytttgtagcctggactgaggtcatttggtgtcacctcgcctggaaggttccagaatcttcactcacacatctgataccttagtggtgatggctggaagactgagcttagctgggattattttttgtttgtttgtttttcagacggaatctctgtcacccaggctggagtgcaatggtgcagcctcggctcactgcaacctttgcctcctgggttcaagctattctcccacctcagccccctgagtagctgggattacaggtgggtaccatcacatgcagctaatttttgtatttttagtagagatgggctttcaccatgttggccaggctggtcttgagctcctgacctctcgtgatctgcccaccctggcctcccaaagtgctgggattacaggcatgaaccactgcacccagccttagctgggactgttgaccaaacatctaccatgtggtggtctcaggcagaagagtcccaggcagaagctacaggcttcttacgacagcctcataaatccgaggacatcacttgcaccaactcagatcagcaagcccagctcagcttcaaggaaaggaaatttctctcttagagaaggaatggcatgcatatcgatggtaggcaggaactgatggtggccaccagcagccaagctcccatatgagcatgtcgactctgaatcccaatttatgatgcaaatccctgctctgccactgtattagtccattcttatggtgctaataaagacatactccagcctgggcacagtggctcacacctgtaatcccaggactttgggaggccaaggcaaatggaccacctggggtcaggagttcgagaccagcctagccaacatggcgaagccccatctctactaaaaatattaaaattggctgggtgtagtggcacatgcctgtagtcccagctacttgggaggctgaggcacagaattgcttgaatgtgcaaggcggaggctgcagtgagccgagatcactccactgcactccagcctgggtgacagagcaaggctctgtctcaaaaaaaaaaaaaaaaaaaaaaaaaaaaaaagacaaaacaaaacaaaaacaagcaaacaaaacccaagactgagtaatttataaaggaaagaggtttaattgactcacacacaatatggctggggaggcctcaggaaacttacaatcatggtggaaggagaagccttcttcacatggtggcagcaaggagaaggagagctgagtgaagggggaagcctcttgtaaaactatcagccctcatgagaatttactcactatcacgagaacagcatggaggtaaccggccctatgattcaattacctcccactgggtccctcctatgacacatgaggattatgggaacgacaatttaagatgagatttgggtggggagagagccagaccatatcagccacttactagaagtgtgactggaagctaattcttttgttatatttctgtgcctcagtttccatatctgtcaagtgagataatagtagtttctatcttattgggtgagaattaaatggattttattttatgttctttttaagatgtgggaaatattgcataatcgaaacttaatacaataagaccagaaagaaaaaaggccccctggtgaggacccccaaggcctggcctctggcagagaagactgagtctgaagcacaacacctcacttcctggcctccaggttccctattgctttccaggggtgttggatwagatggtgctgggattccttccatccccagccttctgcatagagttaaggagctggttgtctstgaatgtcgggagggagcttgtggtactgttgggcatgttggttttctttcctttctgagggacctagttgagcagtcttcaggtgggaaggggtctgctctggggcctttctgagttgagccttaggtgtcctcttgcatcttgtccatttgaaaggcttggattttgtctcaggagccgatgtggtgccacctgtttgtgggtctggaattttagggtcggctgtggtgatgggcccttttgagggcctggatgcgtccatctcaactgtgtaggctttttatcctgacattttcacttttgcttaggcatatcttctctgtctgcttatttgtggcaagtggtggctgcccatgagtgacggattctcaaacatatgagctgtctgtttccttggtattaggttcttggggttcccacttaataatgataatagtgataccgttgatgagagcctcttctaatgaatgctcactgtgtcctagtctctgtgaaggcacatcaaagataactccttaatccccgcagtggtccagtgaagggggagctatccctgctttattcataaagagattgagtcttggggagatgagatgacatgcccaagttaaggaaagggcagagctacaatttgaacttgttcttcccagtctcagtctcaagtcttcttcctgctctgtgttgttttcttctcctaaatgatctcaaagacgtatcagatctgtgtgtcataaacaccctgcctgagaccaaagaatggcagcttcatttagagtttctttgtgacagcaggacagaaacacatgaattccttacgtgtgcagaggacttgctctgccaggtgctggaggtaccaagagaaaggagactcagtgctcatcctagaggcgccggatttgtggggagatgctaggaaaagaccacaaacacagcctggaaaagggctgttggggacaagggtgccgaagtgagagtttactgtattttggctcatcctgaaatccactcttggacttcttttcatggaaaaaatgaatatttttgaaagttattattttatcaaaatgtttttgaaataaatgtgaaattactattaataataataataaatgaattattttctcgctggcatctcctaagaagaaatccattgtctgagggtggtccccaagcccctgcaatgaagcgtctcatcagaaataagacgcaaccaatgcctgaagtgtccataaatgtatttgcctttcagttactggtatgcggtgatggtataaagaagggctgtcaaatcctggtcctgcacttggtaggggtgtgaccttgggtctctcatgtcacctctttgggcctccatttccttatctataaaatgagaatagttgaagaacacaccccataagactcttgtgataagtaaatgacgtgatatatgtaaaatccttcaatagtatctggcacagaggatgtgcttaagtattttttgctcttgctgtcgttgatgtcatcattatcatcatccagcataaaggcaagatggcattgtagaaaggatgggawaaatactacattttccatttatatgaggattttccttcctgcacccgatggattgtcctgctccccctggagtatgtgtcctccactttggagcatgccagtgtgaaaagtagagttgacatttttattcttgatggtgctatagcccttctcttatgctgaatagctgaggaattgcttgtcttgttttcaagagttgtcttctatcctggatgacaaccttagaatgttcttagaatttgttcctttgttgatttagcaaatactcaaagaggacctgatgtgtgttgggcaatgtgcttgtcactggggataaagtagtgaacaggaccctgaagatctctagaggatcttacaatcttgtaggaaaagcagaaaaagtcagactaacacattcaatcatgttggatcgtgatagacgctaggaaggaaaggaacagggtactgtaataaggartcattagtcaggagcactagcctagctggggaaggcctcagggtggcctctctgtagaggtgatgtttgagctgagacttgaagggtgagaaggagggagccatgggaagctctgtggggagagcattctggcatagggcatagcaacaaggctttcctattagtgaaggtagcctaattgcagtaacaagttatttcttcctgtaagtttatctctcactcactcaaatcatgatccagtgggattgggggtgggactctgctgtctgatcacaatgggactctgtgctatcatctccaaaggtgttggaggctaccgcaggatcctttgtgtgaccactgcatggaggaagaggaagagcagaggatggctcaggaggttggaggtttctatgggccatacctgaagtggatgtacctgtttcctcccacctgctttttttttttctccccaagagatggggtcttgcttattgcccaggctggagtacagtggtgtgatcacagctcactgcagccttgaactcctcggatcaagtgatcctcctgctttggcctcccaaagagctgggatcacaggcatgggccactgtgcccggccccctcccacctkctattgaacagaatttggcatgtgaccaagtgcaagggatgctgggaaacatgccctagccgcatgctagaagaacaggrcctaagttggggggcatccttccaggcttttctgtaacccctaattttggagggtacagaggcagctctaggtgccccagtgaaggctgataagcaggttgatggtaagggtttgggagtcttgtaggaatccaggagaatgaacagtctcatcgctgggctgcatggaaagggaagtggtgagccrctggcactgaggactttcctgtctgtaactagagctgctgatggtgatgtctcttagacagcctcatctgccctcttgggtttctctcacagatgtggccctcccctccccagcacagactgtctccaaaccttggctttttctgttgctgccacatcagtgacagctttggttttgcaacctcccaaggatggacccctgagagagaggcctcctatgggccatgccttttaaagccagcacacatgagcaggctgctttggagatcagtatcctttggcacggccagcctttcctgggcataggggtggattggaggtggtctcctgtaagaggacatcgtctggctcccgggctgtgggcagtggtgggtgcctgttacggattgaattgtccttaccaatttcatatgtcaaggtcctaatccccatactcagaatgtgatcttatttggaaagagggtctttgcagatgtaattagttgagatgaaatcataatggaatagagtgggccctaatccaatatgactggtttccttatgagaagaggagagagagacacagggagagaaggccatgtgaagacagatacagaaatctgagtcatgcatctgcaagctaaggaacaccaggggtgctccctcaggaggaaccagcctcgccaacactttgattttggacttctggtctccagaactgtgagacaaacttctgttgtttcggccatccaatttttggtatttcatgagtggcaggcctaacacacaaatacactctcatgtaacaggggcctgagggcaacggggtgagtacagggattgacctacccattcagccactgatactatggatgggttgtggtttgtcataacggaatttaagaggcgttgctttcttccacgtgtcatgttattttctagmtgcgttggttctggcctgggccctgagggtgtaagagggaatacagtgtagtgggtaaacgagggaggcagcatttgtccctcaaaatagcaccaagttctgggaatgcaggtatatttggagttcctgacaagtcagtgcaggtccaacgtcttagggattgtgctgagttgggggagggatctagttaaagatgtcccttggtgaatcatttttgaaaaaaaaaaaattatctccactacctgtcccctagtctgtcttagatataaatgcgggtttttgtatatcaggctcgcaaaattatgtgtcttgatttgtcttgggagagatttaggtgctgtgcagtttggggttgaaatcagaaatcctggggttgacttttcctgctttcatgcaaggcccgatcttggggccaggccttcggtagtcctgacccacagactaagagtgctgggaggccagggaccctgtctgttctgttcataagggggacttcccagcacctggcccatatctggcctgtggctggtgctcctcagatacctggttaacagatgaatcaggaaaaggccctggctgcccctttcagcctcggacttccggtttcttcctaaccatggcagcagtatctggggttgagatagggcacctctgtgacaacttcctctttaaccatacaccrtggttccactcgtggtcctggcacttagtgactgtgtgaccttaggcaatctacttggcctctttgagtctcagttttcttttttcttgtcttttttttttttgagatggagtctcactctgtccccaggctgaagtgcagyggcacaatttcagttcactgcaacctctgcctcccgggttcaagcaattattctgcctcagcctcctgagtagctgggattacaggtaccctccacctcacctggctaatttttgtatttttagtagagatggggttccaccatgttgaccaggctggycttgaacttctgacctcaagtgatctgcctgcaytggcctcccaaagtgttgggattacaggtgtgagtcaccgcgcctggcctgagtctcagttttcttatctataagatggggtaatagtggagctyaccccatcagatcactgggaggattcagtttgtaagtgattgtcacaagtccagtatgtacttaacacagggtgcctcccagccatgctgccwtatgtctcctcaggcagcaggtgcctgcatttgtgtttgcgtgggggacatgggacaggctgagacatagctcgcatgtgtagggggtgtcctcctcctgctcttctgtagcacacagctaggggtcctctggggttaagtgctcttggacctgagcctggatataaaagcagcccagtgcttctgggaggctggggaggcctgggcttggagaaggagcgtcgacagggtgaaggtgaagttctggaaatagaaacagtgatgataccacatcacagcctgggggccactccactgtcacagggctgttgggaagaagctgtaaggtgctgctttcatctatacaagttgtgctggwggccaggggtaggcgtgagttttgggaggtgaagtatctgtgtgtgtgaaggattctgttttgagaaagaaggaaatgggaacttactaatttgtagaatggaaactagcaaaattaggcaaggcatggtgagagcatgtgcagcaggaagaggagaccccgcagagctcagaagaggtggaggaggggctggcctccccggcctcaggacttcagggatcccactgcgtcttctctgctcctgcttcggctggatttcaccggccaggtgtctctctccccagcactaccagccactccaggatgtccctggcctgccaccagcctccaccagtgggaaaagcccctacaccaggtagtagcatgactgaaggagggcccgtgtccctggggaggcaagaagggcccaagcccagcgtggcgcagagtgaacgttacgccagtttcctgtttagacagctctgagctgcttccctctggccttgcatatttctcctaattaaaacaactgctttttccccctcattatagaagtactatgtgttcattggtagacacattttaacctacttctgggtgagaaaaacaaccccttagcccccgccacccccctacccagagagatggtgttaacacctggtgtaccaccttccaaatctttttgtccaacaaaactttattcacaagacattttcacaacatgcgacccttttgtaatgtactttagtaatctgcctttttcattttgtactacwttgtgaccatgttagtattattaactaatttattttagttaatgaattaattaattttttgaggcagggtcttgctctgtcacccaggttggtgtgcagtggtgtgaccataggtcactgtagccttgaactcctggcctcaagagakcctcccatcttggcctcccaaagtgctgggattacaggtgcaagccactgagcctggcctgttattaatttttttttttttttttgagacagagtctcgctctattgcccaggtgcaatggcaccatcttggctcactgcaagctccgcctcccaggttcacaccattctcctgcctcaacctcccgagtagctgggactacaggcgcccgccaccacacttggctaatttttttgtatttttagtggagatggggtttcaccgtgttagccaggatggtctcgatctcctgacctcgtgatcctcccaccttggcctcctaaagtgctgggattacaggtgtgaaccactgagcccagcctgttattaactattttaaatgtcgatgttggtttaaaaaataatatgacagaccccacatactcaagagcaagggatccagggtctgactgcctgggttcaratcttggctatgccacttatcccatttgtggccatggacaagttacttaacttttcattgcactcatctgtaaaataggataataatggtacctattacactggactctcatgaggattaggggagttaattatgtatcatactttgggtatcatagtacctggcaaatatcccaagcactctataagagctactattgctattattattgtttaaatttacttttattgtaagttctgggatacatgtgcagaatgtgtgggatacataggtaagcgtttgccatcgtggcttgctgcacctatcagctcatcacctagatattaagccctgcatgtattagctatttattctgatgctctcctccatccttaccctgctccccaacaggccctggtgtgtgttgttctcctccctgtgtccatgtgttctcattgatcagctcccacttatgattgagaacatgcagtgtttggttttctgttcccgtgttagtttgctgaggatgatggcttccagcttcatctatgtccctgcgaaggacacgatctcgttccgttttatggctgcatagtattccatggtgtatatgtaccatattttctttatccagtctattgttgatgggcatttgggttgattccctatcttcgctattgtgatactattgctattattattattattattattattgttatttccaaccctctrtgataggcagaataaacgctctctgctcccaagatgcccttgtcttaatccctggagcctgtgaatatattactctatacggcaaaatgctccttgcagattgaacagatcttgagatggggagatgatcctggattatctgggtggatatgatgaaatcacaaaggtccttgcaggagggaggcaggagggtcagagtcagagtgagactggaagatggcaccagctggctctgaagatggaggaaggggccatgaatcaaggaatgcaggtggcttgtgcaagctggaaaaggcaaaggaactcattctcccctagagggtctggagaaagcttgtcccagtgatgccttgattttagccccatgagactcatgacttttgctcgtctccagagctgcaagataatcaatttgagtaaagctattatgcatgtgggaattcagtagcgtagcgattgagaataaataacccccaaccccgcaaccaacttagatgagttgtgatgtttgctttggatcttttttgtttttaagaaataaaatatagttaagttctcataagtacccttccctccctagagaaatcagtatcatgatttaataattataattcccatttcaaaaattttcatccatgattaacatataatatgttttgcaggyctttacataaaagacactgcgtggtgtgtatccctcaagcaacttgcatgtttttgcttgaccttgtgaagattttccatgttgatgtagctttattttaacatccatgagcaatttcactcaacagtacaccacgatagattgatctgtcctgtcaatgctggacatttaggttgtttccaatcatgatactcccgattccagcaaacaygtcttcgctattgtttgaaattactataggattctaccttattttttaaaaacctatctcccattttttcgatattagatagttgttttttattttctttaattttttttttcttgaggtggtgtcttgctttgtcacccaggctggagtgcagtggcacaatctcagctcactgcaacctccgcctccagggttcaagcgattctcttgcttcagcttccccagtagctgggattacagttgtacaccaccacgcctggttaatttttgtacttttagtagagacggggtttcactatgttggtcaggctggtctcgaactcctgaccacaagtgatccacccacctcagcctcccaaagtgttgggattacaggcatcagccatcacacctggccaacatttcattttgaaatggcttccaaaaaatctgtggctgtgcagaggtgcccaccaacattctgtctggaatgaaaaaactagaagttagctccttcaggtgagtacagtcttttttttttttttttttttttttttttttttttttttgagacggatctcgctctttcgcccaggccagagtgcagtggcgctatctcggctcactgcaagctccgcctcccgggttcacaccattctcttgcctcagcctccacagtagttgggattacaggcgcccgccaccgcgcccagctaattttttgtatttttagtagagatggggtttcaccgtgttagccaggatggtctcgatctcctgacstcgtgatccacccgcctcggcctcccaaagtgctgggattacaggcgtgagccaccgcgcccggcctcaggtgggtacagtcttattcatgtctgtacttccagcttttgctaccaagtgttcccagtagatgcttagtagatatgtgatattgaatgtgtaactgctaccttgacctaccaccttctcttgatgaggaacctatagatttgttttctttctttttttgtttttgttttgagactgagtggagtttcactcttgtcgccgggctggagtgcagtggcgcaatctcagctcactacaacctctgcctcccaggttcaagcaattctcatgcctcagcctcccaagtagctgggattacaggcatgcgccaccacgcccagctgattttgtatttttagtagggacggcatttcatcattttgatcaggctggtctcgaactcctgacctcaggtgatccacccacctcagcctcccaaagtgcaaaagaaattaatacttttattgagataaaaacattgtataccctataatgtaccccttaatgtatactgttaagtggtttttagtatattcagagttgtaccaacattatcataatcagttttagaatgtttcataatttcccccaaatcctatacattagcagtcacctctactttactttcccccatccctggcaatgacaaatctactttttgcctttacagagtttcctattctggacatttctcacaatacatggctttttgcatttcactttttttttttttttttttttgtgagacggaatctcactctgtcgcccaggctggagtgcagtggcatgatctcggctcactgcaagctctgcctcatgggttcatgccattctcctgcctcagcctcctgagtagctgggactacaggtgcccaccaccacgcctgtctaattttttttgtatttttagtagagatggggttttgctgtgttagccaggatgcatctcacttctttagcctaacataagkttcgttcatattgtagcatattatcaacacttcattcctttttaagactaatattccattgcatggatagaccatattttgtttatccattcatcacttgatggacatttagrtagttctctctttttggttactgttttcattttctttgttctttctttcctttctttcttttctttctttcctttctttccttcctttcctttcctttcctttcctttcttttctccttttcttttcttttcttttcctttcttttcttcttccctccctccctccctccctccctccctcccttccttccttccttccttttctttctttctttactctctacagtctcactgtgtcggtcaggccggagggcagtggtgcgattttggttcactgcatcctctacctcctggattcaagtgattctcgtgcctcagcctcctgagtggctgggattacaggcgtgtaccaccacacctggctaagttttgtatttttaatacagacagggtttcactatgttggccaagctagtcttgaactcctggcctcaagtgatccacctgccttgcctcccagagtgctgggattacaggtatgagccaccgtgcctggactctttttggttattgtgaataatactgcggtggacattcatgtacaagtttttgtgtgaacacatgtttccatttctcttggctctttgcctaagagtggaattctaggttatctgtaactgtttaatcacttaaggaattgccaagactgtttgccaaagcagttgcaccatttactttcccaccagcaatgtatgagggctccaacttccccatgtcctcgccaacacatgttagtatctgtctttttggttatcaccrtcctagtggaggtgaagtgttatgtcattgtggttctgatttgcattttcctgattgctcattgctctatcttaaatagttgatgtaataatttccttctaaacattggctttctgtagacagtgtcctattttcaacttttctgggccccagcattgtcttctggcatggggttggtgctgactagggcgtaaatgaatgaggcaactctggatatgttagcttgcagcacatgggcatggacactgattggcaaggatgtgcttcttggcttgagtcaagaatcatacattttaaccatcacttctgctttttttgtggcacaaaaggaccattttttgaagttagtaacctgtcttagttccctcagtagatgtttgtccaaatgttgcggtgaagcatagcacagacttttcatcatttcaaggtttaacgcctcagcccagggagtgtatatttggtgaccgttttcccagagccctggaaatgcttcttcctaactgtccactttgagctcctctgcctcctctttggcaatcagttacctcctaagaggaacctggagaaatgtcattgggaagtgctgctggcaccaggatgagagagtgttcttgaaagcttgggagcagtattgagcatctgccatgtgtcagtattgtgctgggcactacaagctcacatgtatccatgtgatcatgtgtatgggtatttatttgtagtgtctagtcattacaatctgtctgtgagttttgcctggtttactcctaagtacagtgagcttcagtgatttgcccaaggttaccaaagttttcagaggaacaacatcagacacttttccccaatcaccatgtgccagaaaacctttaggttaagaggttaacaagacaagccacagataggggaaaatatttatgaaacaagagctgataaaggacccrtatccaaaatagrcaactcttaaaactcaacaataaaaggccaggctcggtagctcatgcctgtaatcccagcactttgggaggccaaggtggatggatcacaaggtcaggagatcgagaccatcctgactaacacggtgaaactctgtctctactaaaaatataaaaaattagccgggtgtggtgtcgggtgcctatagtcccagctactcaggaggctgaggcaggagaatggcgttaacccaggaggtggagcttgcagtgagcagagattgcaccactgcacttcagcctgggtaacagagcgagactccatctcagaaaaaaaaaaaaaaaaaacaaaacgcaagaaaacaacaaaaaaaaccaaaaacaaaagctcaacaataagaaaacaacccaattaaaaagtgggcgaaagatctgaacagatgcctcacacccccttcccccaccccactcacaatgctttgccatccatgtctccatcctgcagtagccaaagctggctgcttctggaccactgctgtgcaatggaaatacagtgtgagtcaccaataccagccatgagagtagtgttttgttttgttttttttttttttttttttttttttttttgctgttattgttgttttgttttttaaatagagatgggattttgttctgggtgaagtgaatcaaactcctgggctcaagtgatcctccgagctcagcctcctgagtagctgggattacaggtgtgagccactgtacgcagtcatgtgtgtagtttaaagttttctagttgccacattcataaaggtaaaaagaggtgaaactaactttattaataaattttatttaactcagtatatccaaagcattattatttcaacatgtatgcaatataattattaacgagatatttgattctggtttttggtctgtgtcttcaaaatccagtgtgtgttttatacctataacacatcttgattcagacagattcaattctgagtgttcaaaagccacatgtggctagtggctaccrtattggatagcacagatctagattatacctcttttgtccttttgcattacctgcttccgtggtccccaagcagcaaaggcattctccatgtggcaggtactatgatcatcatagtggtgctccctgtgtgtgtgatcaggtagctttaatttcccacagagactgaaaatgtggaagtgtgtctaccagctttgccatctgtcctagatttaggtgtgacatctgattgctgggcccgagcatccagtgccagctgtacttctgcagattactgggtaatcacagtagaacctttcttgggggttgcttktgacccaggcagcactgctcagcttgtggccagggagcttcatgaccattgagagtaggagtctgcaccattacatgatcataggatagcctgcagacatgtgattcgtgtcttgtaagttgtaactgagtaaatttttatatatggaaagaaatagaatgctgaaagggggatcatgagggtccaggtgtggggctggggacatggaaggcctcactgagaagctggcatttgagcaaaggcttggaaaagttgaaggagtgggctgtgtagataagtgttttgagggcttcaggaatggccaggacaaagccttcgaggtggggcatgttctggggatagccagccaagcagggtgatgggggcagagttatggggaggaagcaggggtcacatgacccagggctgtggaggcctccatagcactcaagcttttcctccagggagccgggagccatgggagagtttgcagtggatgacggatgactgatatggcccctcgggctgctctggttggctttctcctgagtcgtccattctaccttctcgccaaggcttcctaggtcatgtttcaagtctgttcaatrcatttccttctccaggtggtcagtggagacctcacagcagaggcttatcttgttgaacgtggtgattcatgtggtgatttcacagggtcagctccccatgtcttgtcccagcggtgtcctcctcctacatcaggagagggaggtcagctctgggacccaagaaagggcagggtgccttggtaacccttctgcaggcttgagggattggggcagtgtgcatctctgcgaggagggcactgaggaggatgggcttctcagatcctgggctctgccttctggatctgagatccaagttgcaaaggaagagctggtttcaggctgaagcattttttcagcttcatacaaggcaggaagcccatcaagcccccacatcgtcatcattgtcatcactgtcactaacgccaccataagagctgacatttatgtagtatatgtttatgtacctgttacagctctaagagctttccctgtattattgcttacttaattccwcaactgtatgtgttcaawacgcattatttccattttacagatgagaacattgaggcatagcccagggtcactgtattagtctgttctcacggctataaagagctaccaaagactgggtaatataaaaaggaaagaggtttaattgastcacagttcagcatggctggaggggccccaggaagcttacaatcatggtggaaggtgaaggcggggctggcatgtgacatggagaaagcaggagcaagagagagggggagggaggtgccacatacttttcaacagccagatctctcaagaactcactgaatattgcaaggacagcaccaagagatggtgcaaaaccgttaatgagcaattcatccccatgatccagtcaccttccaccagaccccacctccagtactgagggttacaattcaacatgagactgctgcggagacagatatgcaaacaatattaggttgtttctaccttttggctattatgaatagtgctgctgtgaacattcatatgcaggattttgtgtagatgtgttttcctttctcttgggtgtacacccaggagtggaattgctgggccatgcggtaaccattcatttaagcatttgtgactacatttaaccttttgaggcaccaccagcctgttttccaacggggctacactgttttgcatttgccaaggcctgttggctgttttggaggcaaacccctccccttaagttccaaagaagtgaatccccagtgtcctgaggtcagaatgtccagggcacccttttagagagagagggaggagggtcctgagagactgtactggagaggctgtgtggccccaagcccacagcactgagtttgagtctcagctctgccacctaccactgtgcaatctttttattttattttattttattttatttttgagatggagtctccctctgtcgcccaggctggagtgcggtggcatgatctcggctcgctacaacctccgcctcccagattcaagccattctcctgtctcagcctcctgagtagctgggactacaggtgcccgccaccacgcctggctaattttttctatttttagtagagatggggtttcactgtgttagccaggatggtctcgatctcctgaccttgtgatccacctgcctctgcctcccaaagtgctgggattacaggcgtgagccacctcacctggccaccactgtgcaatcttgagcaagctccatagcctctgtgggcctggcctctgtttccccctatgcaaaatggggcttatcagagcatgctggaggggctcccatgagatcaggggagacatgagcttggtgtagtttgtggcctattggacctgcctgatgaaggttgctgcctgtgaggttggtggtgtctaccaggcattgtcctctaaaatataatactcctattctaggggtgaggaaggagtgtgggtgtgtgttctgagtagctcatgagagagtgggaacctgtgctaagccaggcctggtctctctgagcatggtgacttggacttgttgcttttgtggcagggaactgaaactgttgcagacactcttggcctgaccttatcccctcagcacacacctctgcacaccacaagccacttgctggaaacacctgtgactatgcctgagggcttctgctagcctgtggtacaggataggctgggagtgctggggtgttagtgcctccaggggtggcatggctgggtggggaatcggcagatcaataccccagctccctcaccctcagtcaggacactcctggcttgttctgcactgactcccaggcttccccaatggacttcggctctatttactcacaggaataataagcttgatgacacagcctttatttgctgcgcttccttccctgtccaccaccccattccccttgcagtgattcctgggatagcccccaaataaactccttgtatgtacatccttgcctcagagtctgtttctgggggaacccagatgaagacagagacccacttagaccctgtgtcaggaaacacatggaccagacttgggccaccctgggacttgctgttttctctgttccctgcggtgtgtgagcctgtgtgtgcctatgcatgtgtctttctcctcttgcccctgattggctagccttgtcacttctgtcctgattctagagggagtgtctgatgtcccagttattgctgccctcagcagagtcaggattttttggccggggcggggggtggggtcagaaaccagctcaagcaaaaaaagagaatttactggaacgtgtggctgagatgcatactgtgtagctcacagcatccaagatgcaatgcctttcccatgctctcttcatctttctgccagtctttgtctgccaccatggttctctccttttttttttcttttttttgagatggagcctacctgtgtcaccaggctggagttcagtggcgtgatctcagctcactgcaacctcctcctcctgggttcaagtgattctcctgcctcagcctcctgagtaggtgggactacaggcactcaccaccacgcccagctaattttgtatttttagtagagatggggtttcaccatcttggccaggatggtttctatctcttgattctcgtggcatgcctcagccttccgaagtgctgggattacggtgtgagccaccgtgcccagcccatgcttctctcctatcccagacgactctagtctatagaacacgtaacgtggccatgagcagcctcataagagaccgtttttctctcagcatctatgcttggccttcgttatttgcagcatcartattggtgaatttgcctttctgctccaacttatttgcaacctgcaaascagtagttctggcccttctgtggtcattcttggtgatgcagactggtgaaaaatttgggtcacccattcacacatgccctgctgaggtcaaacaagatgacactctgccttcctgttttagctttctttttgcaaacaggtgtcctttctgccgtccacttagtgccttattttctgcaatttcttttttttwttttttgctggtgatgttgctctttaaaatggccctgagcaaagtgcatttatttctcattaattcattcttcctgttattgatttattcagtgactatctatggatcatttgctcagggcaaagcactgtattgagttctgatagaaggagacagggtctttaatttcatcgaccttattgtttagtgggagaggcaagcacaacattgatcaaataattttgtacatgactatatttataacgaaaatgaaggtaacttttgcttccctctctaagaggcaccaagggaggttatgcacctgagaagcagcccagggaacagcagcgaaactgatctaacagtggccttcctggccctagtggctgtgctttgtggtctaaggccacgtttaacctgtgtaccagagggacatgagtgtgcacttcctggaatgaccctgaggtgttcagtgtgctggggaaggtcatatggcaccacgtatgacagcagtgttggggttgaacaagcctgggcttgcctcctgagtctcccattctgtctgtgtgactccctccttgggtctcagtgtctgcatctgtcaaatgggcacaccggtggtaccttcctcgtgtgtgggtgtaaagactagagatcgggtatgtaaaacctttaggttagtgctcagttatgagcactttggttggcagtatcatcgataagggatggttttgcacgtcggggttcaggactcaaaagggaaggccattcccagtgttagtcacctgagaagatgatggattccctaggctgggaactggtttcaggatgatgtttccgttttcttttttctttttttaggtatttctcctagtgctatccctcctctagtcccccaacccctaacaggccccagtgtgtggtgttcccctccctgtgtgcatgggttctcattgttcaactcgcacttaagagtaagaaaatgtggtgtttggtttcctgttcttgtgttagtttgctgagaatgatggtttccagcttcatccatgtccctgcaaaggacatgagctcatccttttttatggttgcatagtattccatggtgtatatgtgccacattttctttatccagtctatcatcgatgggcatttggattggttccatgtctttgctcttgtgaatagtgccgcaataaacatatgtgtgcatgtgtctttatagtagaatgatttacaatccttttggtttatacccagtaataggattgctggatcaaatggtatttctggtgctagatactcgaggaattgccacgctgtcttccacaatggttgaactgatttacactcctaccaacagtgtaaaagcattcctatttctctacatcctctccagcatctgttgtttcctgacttttttttttttttttttttttttgagacggagtcttgctcttttgcccaggctggagtgcagtggtgctatctcagctcactgcaagctctgcctcctgggttcacgccattctcctgtctcagcctcctgagtagctgggactacaggcacctgccaccgcgcctggctaattttttgtatttttagtagagacgaagtttcaccgtgttagccaggatggtcttgatctcctgacctcgtgatccacccgcctcagcctcccacagtgctgagattacaggcgtgagccaccgcacccggcctgttgtttactgactttttaatgatcgtcattctaactggcatgagatggtatctcattgtagttttgatttgcatttctgtaatgaccagtgatgatgagcttttttcctatgtttcttggctgcataaatgtcttcttttgagaagtgtctgttcatatcctttgtccactttttgatggggttgttttttcttgtaaatttgtttaagttctttgtagattctggatattagccatttgtcagatggatagattgcaaaatttttcttccattctgtatgttgcctgctcactctgatgatagtttcttttgctgtgcagaagctctttagctgaattagatcccatttgttaattttgccattggttttggtgttttagtcatgaagtctttgcccatgcctatgtcctgaatggtattgcctaggtttttttctagggttttttatggttttaggtcttatgtttaagtcttttatccatcttgagttaatttttgtataaggtgtaaggaaggggtccagtttcagttttctgcatatggctagctggttttcccaacaccatttattaagtagggaatcctttccccgttgcttgtttttgtcaagtttgtcaaagatcagatggtggtagatgtgygatgttatttctaaggtctgtgttctgttgcaatggtctrtatatctattttggtaccagtaccatgctgttttgttkaccatagccttgtagtatagtttgaagtcaggtagcatgatgcctgcagcttgttctttctgcttagggttgtcttggttrtgtggkctcttttttggttccatatgaaatttaaagtagtttctaattctgtgaagaaagtcaatgatagcttgatgggaatagcattgaatctataaattactttgggcagtatggccattttcaccatattgatgcttcctgtccatgagcatggaatcttttttcatttatttgtgtcctctcttatttccttgagcagttgtttgtagttctctttgaagaggtccttcacatcccttgtaagttgtattcctaggtattttattctcttagtagcaattgtgaatgggagttcactcatgatttagctctgtgtttgtctgtcatggtgtagaaatggttgtgatttttgcacattgattttgtatccygagactctgctgaaattgcttatcagctgaaggagatttttctataacagtgtraaaacacaggagcttaaaacaacaattctgtgggtcaggaatttgggcagagctcagtcagtggatttgctgttctgtctcacttggtgttgcctggagtcccttacctgaatatattcatyggatggccaggctggaagttcccaggcagctttctgggccrccagtgttcctttgtgcagcgtctctccctgttctgtggctagtttgggcttccttacagcatggtggtctcatagtagctagtcttctctgtgatggcttccaaggsacagaaagcagaagcctgaagcttttgctgtgttaaaaggaagtcacaaggccagccctgacacagggaagggaaatagattctacctgttgatgggaagaagtttgtggctatcgtgaatccaccagagatggagaccmtggtattcaggggcatctctctgagccttgaccttgggtgtgttgagtgatctagaaggcaggtctggtacttggatattagaaggctgccctccataaggagagaggataaggggctgggaacccaggctggggtctgtgtgttagtgccaaactttggggctaggatataaatgtcttaagatacagcggaggggaatggtaccgggtctgaaggataggctgtctttttgcttgttttctggttatttcactgttctcctcaataggtaataaggtcttctcaggggacctgcctgttttagcagtgcttcaggagctgagacaggggcagagatatagtctggggtcagaatgtttaggagtggaggatctgcgaggtggggtgtagccgggattggattgaaaggtacccatggggactgagtgcagtggctcatgcctgtaatcccagcacttgtggagattgaggcgggcagatcacatgaggtcaggagttcgagaccagcctggccaaaatggtgaaatcccatctctactaaaacaatacgaaaattagccaggcatggtggcatgtgcctgtaatcctagctactcgggaggctgaggcaggagaatcacttgaacccgggasgtggaggttgcagtgaaccaagatcatgccactgcactccagcctgggcaacagtacgagactctgtctcaaaagaaaaaaaaaagacaccctgggggacatgaagcacaggcagaatggagagcaaggacccaaggcttttgtcctgtctcactgttcccttgctgtgtgaccacagggagttaacctctctgaacctcagtttctttgtctctgcagtggggattatgatgatcctctccccatagagttgggataaagattaaatgagccaatacacattaggtttgtagcacagggtttgtctagagtaagtgctgactaaacgtcagctgctggagatggtggcgataagaagttacttttattattatcaggactgcttgttccagtggctgttccagcctgacaaatcttccaaggcaaaaccagagttgctgaagttaacttttaaacatttcctttttttcctgagttatggaaggaatgataattggggaattcaggcttaaaatgaagcacctgtgatatgacgctctggaacgcctcttcatgcagagggtggttatgcgaagggaggaggttttattgcatatggggccttactggacagtgaagggagggggttcccagctctccctggtgggcccaggctagagcatgggtctcccagtcctcaccaaggggtctcagcctcagcaggttggcagccacacaacacagtgagatccttctgtgtagctgagcctctgattcccagaggtgaagatacagtcttagagtgtatcccagggaccctgtctttccagygggaaactgcaggggctgagagaccaccccctagaggcttcctcatttgcatctttaacactgccatggttgggggctgttttcttcttcagcctgccctgcctgggctctgttgactactcagcctgttgttctgaagttctcctggccctttcagaggccatgggggctcaaaagccactcagaacacaagtccctcttcagctgctgggagtctgagcatgggaaaatccwgcctgattttttccagttcccatgcaggtggtggcttcttcgaytctcgcggtcttcttggtggaaacctttgtaggtcttaagtgcgctataattgagcastcttaartgaccagacacagtggctcacgcctgtaatcccagcactttgggaggccaaggtgggcggatcacttgaggtcaggagttcgagaccagcccggccaacattgtgaaaccccgttttttactaaaaatacaaaaattagccaggcgtggtgacttgcgcctgtaatcctggctactcaggaggctgaggcaagagaattgcttgaacccgggaggtggaggttgcggtgagccgagattgtgccactgcacttcagcctgggtgacagagcaagacttcatctttaaaaaaaaaaaaaaaatgtgccttcatggacaggcacgatggcttatgccggtaatcccagcactttgggaggctgaggcaggaggatcacttgaggtcaggagttcgagaccagcctggccaatatggtgaaactctgcctctactaaaaatataaaaattagctgggtgtggcagcacatgcctgtaatcccagctacgtgggaggcagaggtgggagaattgcttgaacctgggagatggaagttacagtgagtccaaatcgtgccactacactccagcctgggcaacagagtaaggccctgtctcaaaaaacaaataaattaggcttcagatactgaactatctggcatatcctattttgggaccatgaaaagggtgacctggcaagtctgagaaggagaccttgtccctcattataatttttttttttttgagacacggtctcattctgttgcccaggttggagtgccatggtgcaatcacagctcaactactgccttgacctcctgggctcaaatgatcctcctccctcagcctcacaagtagctgggactacaggcatgcaccaccatgcccagctaattttaactttttttttttttttttttttttttttttttagtagaggtgggatctcactatgttgtctaggctggtcttaaactcctgggctaaagcagtcctcgcatttcagcctcccaaaatgctgggattacaggcattagccacggtgcccagccagaaattatgacttactcccaaggtcctgatgtccagaagcaagaactgaaagtgcggttgcgctgttatcattagtgggaaaacactcaggcacctggggccacatccggttctgcctctttctagctggtctagagtcttctctgagctgggctttttttcctatgcccattgcacagttacccatttattgcccagaaggtgacgggcactggatgcgttagatgctggggaaatagaggcacaaccatcacagtgtccttcttgtgagttttgaaggctggtggggagagacggatggtaaacagggaggtgaagacaaagccctctctttacaagcgaagtcagcacaagggacaggaagagcgcrcatgatgggtggtcagraaaggcctctctgaggagctgatatttaggccgagatccgatgggaagaatcctctaggtggagaaggactatgcatccatcccccatgtataaaatgggaataatattagtacctgtgccrtgaggcagttgtgaaggtaaaatgaattagtgcgtgtgaagcacctatcttccactaaaaacagaaagctgttttagatgttgatattactattattatttttgagaaggagtttcgcttttgttgcgcacgctggagtgcatcgtcttgaggggtgctgcgcaaggcactagggtggttttaaacgcctttcgtcagctgtgtttggtgttgctacagcttcagtaaacacaagtgataaaacaacagccctcaaactgcacctgcccttccagaagatgacaaagatgtatgtagaacatcagagggtaccttgtgattattttattttatctatttatttttaaaatttcaagtagagatagggtctcactgtgttgcccaggctggtctaaaactcccagactcaagcgacccccatgcccttggcctctcagagagctggggttacaggcataagcccctgcactcggttgtgattctttcacttaacacatttattgataagttattacatgtcaggcccaggccagggtaggcaaaaatgagacaagctccctgtgcttatgaacatgttctcacgttccttactgtttcggggagaagggggttaagtgaacacttggggttgagagcaaagacccaaaggagaagacagattctgggagggaaggggcaagattagagagacctggttgtcatctactctctgttccttcctttcatgtggcctgggctcggtcacttcctctctgtcggctcgtgtcccctgatctgtgaagtgagaattacaacacctactttacagggctctcgtgastattcagccagctagtgtgttaagctcttactccygttaggattgcttcggccctctgtgcctcagtttcctcactggtgaggtcctttctgcctgatcaagtctgtggctcagtcagctcctcacttcctgcccctctggaggacatcccattagtctctcattccatcgtgctcttctctttgggagcattgtcatatggtggttatttatatttatgtgggcatttaatgtctctctttctcagactgtcagctctttgaaagggggctgtttgttccattcattgttcctgtgtcatgcatgatgactagcacataccaggtagaccatagatgctgtctgcatgggtgaatgccattcttcctctgcttgcatcttggggatactcatcggctgcacggaaatggagctccgaaggcctgagcttcaggaattatctgcttggtgggggctgtgtttctggaggcttcagtggcctgaacaatagccaggacagagccaactagccgggcataccttttctctgcagcagcaagccttgttggcactgtgggcagcaggaaatggttgaaataacttccatcatgatgccccttgtcatgagtttccatggaaactgaggsctgctgagcctgtcactctggcataagggaggagtgtggagggcagcctcatgagaactggtatttaggtagaatatgaatagggggatttgattccttttccataagctagtgtgggctcatggattttttttttttttttttttttttactgtggtggggctctttgaatcacaaaaataaatacagctttttagtgagaacttagggtatttccaacactgtcatcttatttcatccttctaggcccaccatgaggcaggtgtaactccttcaatttgcagaggaagctgaggctcagagaggtccagtgacttgctcaagtctacacagcggggcatggcagagttcagatccacattctggtcggcctgactgtggggttcagtggrggttggcggtgcttgagcatggaagacaaagaccttgttgggtgccgggctgcttctagagatggatgtggtgggtggaggatggtttgtgttctttccagagtcagatggctgggcagagtcaggacatcctgggggtgttggattcccaggtgtggagtgacaacactgcctcatatccattttcagagctcatttctgaggcttcatctggtaccaaccctgtgaggcgaggrwgctcctgcgaatccccttgtgcagccaggcttggagaagtcaaggatttggcttggggcacccaggaagcctgaggcttagctgggtggacctcctggctcctcgcccactgcttttcaccctgccctgaggtgtgagatcttcccagccacctctggaaggctggactctatcccagctcagttatttatgtatttattattattattattttttgagaccaagcttcgctctttcgcccaggctgtagtgcggtggcgctatctcggctcactgcaacctccgccttctggtttcaagcgaatctcctgcctcagcctcctgagcagctgggattacaggtacccaccaccatgcctggctaatttttgtatttttagcagagatgggggtttcaccatgttggccaggctggtctcgaactcctgaccttgtgatctgcccgcctcagcctcccaaagtgctgggattacagctgtgagccactgtgcctagccctagctcagttttaaaaattacatttagtaggtcttattttccattatcagagaaatgcagattcattctagaacctttggaaaagatagacaaacacaaaagaaaaatatctcccattgactaccctccagggagcactggacccaaactaggatctggttgcttttctgtgaagatgtcctatttcatctttaaggattatgatcttttaggtaatggaagttgtgcttcatattttaagaactttttaaaatgaactttatttcatatttaatttatatacaataaaaggcactcattttaagtacacagtttgatgcattttgacacatgtgtagacatgtgtaaccaccaccctaattgagacacagaacaccttccatcgcaggagagagggttccctcacttccctctgcagtctgcagccccccaccctccccagcatgcacactccctgccccaggctaccccaacctactttgagtcatccaggatttttccttggttttagaatttcataaacatggaatgaaacagtagactgtgttttgcattcgacttcttttgtgtgatgttctcaaggttcacccatgttgttgctagtgtcagtagtttttccttttctgttgctgagcagcattccagtgaccgaatataccactgcctactcccccattctcctcatgggagatcttgggcatatcagttttcccctctgtataatggggaaacattacccaattttttttttttgagacagagtctcactctattacccaggctggagtgcagtggcgcaatcttggcccactgcagcttccgcctcccaggttcaagcaatcctcccacctcagcctcctgagtagctgggattacargtgcacaccatcatgcctggctaatttttgtatttttagtagaggcagggtctcatcatggtggctaggctagtctagaactcctgacgtcaaatgatccgcccacctcagcctcctgagtaggtgggattacaggtgcacaccatcatgcstggctaatttttgtgtttttagtagagatgggggcctcatcatgttggctaggctggtctagaactcctgacgtcaaatgatccgcccacctcagcctcctgagtagctgggattacaggtgcacaccatcatgcctggctaatttttgtatttttagtagagacagggtctcatcatgttggctaggctggtctagaactcctgatgtcaaatgatctgcccgcctcggcctcccaaagtgctgggattacaggcgtgcgtgagccgccgtgcctggccacattacccgctttatcagattgttgtggggattcagtgagttaacatgtgagtgattagaataatgcctggcacatagcagatgctaaatatcatagtaataataatggattgttgtctcttgctgtgtaacaaaccaccccaaggcatagtggtgaatactggaggtatttccagtttggggctcttgaataatatgagtgaatgaatgaaataatacaaatgtacatgtgtagttgggcagcctcggtggctgttgccttcctcgagggctcgaatgctgtgtgtcttggtgatcggctgacaggcagccgttgcctcttctaagatgggtggttttccttttgaggtgggtcctgggggctcctggctgctcagtgctggccctacttgttgccttgtgtgctgctctgagccaggcttggtcttgctgggctgaccaacccatttaagcctcaggaagtggcctctgtagaaaaaaatgtataagcagcgggtggtgaacagatcagtggagcgcagagccccaaaatagatctttctccgctaacttgccaagcaactgggggcagtggcaaatgctttgcataacttcctacccaaaagaaaaggttttactgcaaacaacttttggggacccctcccctctcaaataatctcagacagatccaagatgtttttttttttttccagagcagcacaaagagagagccagacaggcctggggttccatcccagatccaccatttgcaggctgtgtgattttgggcaaattccttaacttcgctgagccttctcttttcctgtgttaactagggaagatgagactagactctccagtgtgtatgcaaagcacccttacgctgcagagatgctgcaaatagggagtgtcttttttttcttcctttttcawttttatcctctgtgcttgccctagagcttgttatcaatttctcttagctttgtcaattgtggtggggtgtgggggattgagatttggctttcctgggaagatgttccaaaactgtctttgaaataatactctcctcctctgcagatcagtggacagggtgttgaagggtcggcatargtggtaagcatgattgatggcccccagagatgtccatgtcctgctccccggarcctgtgggtatgtcatgttacttggtaaagaggaccttgcagatgaaattaagtgaagaaggttgagatgggagagtattctgggttacccaggtggatccagtgtgttcacagggtccttttaagaaaaaggcggggctgggggcagtrgctcatgcctgtaatcccagcactttgggaggccgaggcgggtggatcacctgaggtcagcagttcgagaccagcctggccaatatggcgaaaccccgtctccactaaaagtgcaaaaattaactgggcatggtggcgtgtacctgtaatcccagctactcagaaggctgaggcaggagaatcgcttgaacccgggaggtgaaggttgtagtgagtgaaccgagttcatgccgctgcactccagcctgggagacaagagcgagactccatctcaaaaaaaaaaaaaaaaaaaagaaaaaggcaggagatcagagtgagtagaagacaatggcaagatgatggcaacagaggttggaatgatgtgcttcaaaggcagaggaagaggccacacggccacgattgcaggcggccactgcaaggtgaaaatggccaggaagcaggttttccctsggagcctccagaaggagccagtgctgccgacaccttggttttagcccagtgagactggttttgacctaggagctgaaagctgataaatgtgtgttgctttaagccactgagtttgcagtaattggtgcagcagccgtagggcacttataaagcaggcgaggcctatgttggctgtggtttcacaggaaagtggcctcttggatgatggcgccttatggtcatttttatgtttcttcccttctgatctggatggattgttttcagttcagcctaggggaggtctggcttccccggggctttacctcgagactggatctctgcagtcaggcctctggtgagcccctgtggccggggcagctgcagcagagaggcttcctctctcgacagaaacgcagaagtgagctgcttgctcgcagaggccaggcttcctgtctggccagtccctgaaatgctgctccccacccctcgccccatgagagtccaggtgaagattgagtgggggtaggggctgcactgtctgatctctgaagtgagccccttcctgtctagcttggatttgtgttgaaggctttaagatgactgttttcttgtttatttacttttaagagacaggatctggctctgtcgcccaggctggagtgcagtagtgtgatcatagctcactgtagcctcaaactcctgggctcaagcgatcttcccgcctcagtctctcaagtagctgagactacagatgtgcaccaccatgcccagctaattttttttttttttccctgtagagacagggtctctctatgttgcccaggctggccttgaattcctggcctcaagcaatcccctgacctcggtgtcccaaagtgctgggattccaggcatgaaccactgcacccagacaattcttttcttttcttttttttccttccttcttttcttttcttttttcttccttcttttctttcctcccttccttcctttccttccatcctttcttcyttccttcctcccttcctcctttccctttccctttccttccttccttcttttccttctttttctgtttctttttctttttcctttcctttcctttcctttcctttcctttcctttcctttcctgtcctgtcctgtcctgtcctgtcctttcctttctttccctccttccctccctccctccctctctttctctctttctttctttcatggagtttcactcttgtcacccaggctggagtgcaatggcgtgatctcagctcaccgcaacctccacctcccggcttcaagcaattctcctccctcagcctcccaagtaactaggattataggcatgcgtccccacacctggctaatttgtgtatttttagtagagacaaggtttcaccacgttggccaggctggtcttgaactcctgatcttaagtaatccacccacctcaacctcccaaagtgctgggattacaagcgtgagccactgcacatggccccagccacttattttcttgtgatttgtcagcaaacagcctctggggttgtgactgctggaaagcacctccagcttttgtggagccaggtgtggctggcacttttcgttgggatcatgtttggatctccctcagrccttctcaccatgttcctcgtgtgccacactggtgagataacggggtgtgggagagactgggcattcagattcagcggttataattaaagggcaacactgaggccaggatggctgggatccwctcgtagctgccatgtgacctctggcctttttgtccttccccatgatgtcacctttcattggatggtgactccctgcacatacccccaaaggtgtccatgtcctaatctttggaacctgtggatatgttacattatgtggcaaaggagatttttgcatgtgtgattaagggaaagatcttgagatggggagattctcctgcatgacccaggtaggcccaatgtaattacaaggatctttaaaagaggaaggtaggaggtcacagtcagggagagagagcaggattctggctttgaaggtggaggaaggggccacaagccaagaaatgcaggtggcctctagagctgggaaaggcaatgggtggattcccccttggagcctccagaaggaacacagccctgctgactccttggtcttagcccagcgagacccgttttggaaatcagacctgcataattgcaagatggtaaatttgtgttgttgtaagccactaggtttgtggggccatcctggcctcagtgatgcttatttgggagtgtgtttttttcctattactgctctaatcttttaaattagatctgaagagatgctctaatttttttttttttttttttttttgagacagagtctcactctgtcacccaggctggagtgcaatggcatgatcacagctcactgcaacctctgtctcctggattcaagccattctcttgcttcagcttcccaagtagctgggactacaggcatggcatgcgccagcacacctggctagttttttgtatttttagtagagacagggtttcaccatgttggccaggctggtctccaactcctgacctcaggtgttccacctgcctcggtctcccaaagtgctgggattataggcgtgagccaccgcgcccagcccgagatgctctaatcttttagagcagtaatagtaggttggtgcaaatgtaattgcagtttaattgtaactttaatggcaaaaattgtgacaacttttgcactcatctaataggaaacacactcccacgtaaccatctcctgagatccctttccttgacccattcggtaaatatttactgagcccctccacatgctggagactctgcttgtcaccagattgaccaaagcaaggtcttgtccttcaggggttcaagtcttaggaagacagagacaagatgacaaggctaagattgtcacatagggtgttaggtgcatcgtagagaaagaagacatagaaatcagatggcattggaccagagaaattttctcagatgtcagtgaaaggagctttgaacttggagcgagctctggaaatgttgtctggtcgcactgggtatctagtaaatatttcaaactcaacgtgtccaaaatggaatttgtcaccaaaacaacggagatctctgcctttaaaacctattcctccagttttccccattgtggtaagagataccaccatccagccaggtccccatgccagaaagctagagtcctcctcggcccctttgccaccttcatttctggcatcatgtccacctcctggttcttggggttcatcactgtttggagatgtgcttccctctgccacggcaaggctccaggatcctaggctcagagttgggggaaccgagaaaagcatcaagtatgatctgtgtcctcacctaggtgcagtaggaggtcagtgtaggggtccatgggcaggttccctgggctccagtttcagctctgcacttaccagtgtgaccttgaggtcaaagtgctcgacctcgtgtgcctcagtctcctcactgataaaatcgcaataatagtaggacctatctcacagcagtgttttagaattcaatgtaacaagcacttagaataacacatgttcagtcagtgatagtggtggttgttggaggaagcttctctacaatactcagtgcttcaaatggtgatagcagcagccactcattaaccacgtcctctcagtggtcttattaacctctgtccttggcgctttaaaaatcctcctcatgctttttgacgagtctacccattttatagatggggaaactgagtttcataaagtagcaagaaccttcccaaagccacttagctggaacagctttaccgtgattttctagtatgactctcaaggctgccggagacaattttgagtaattgctgggtttttaaaaagttcttcttctgtatccatttgaggtcttggtttatccctgctggagatccgcagaaccagcctcctgcctcctgtggatccgatgagatgactgaagataggacacttgatcctggacttgtttctacttccagcctccctgttcccctagggaatttcctcatgttttgcagattcctaagccccatgattgtgctgtggcctagggctgcatgtccttgttgaccttgcgctgaaataagactcaggggatgcccctcaacgggatgtgtggtaaggtgcatggttaatctcatacattatagaggattgctgggtttttttttttttggggacagggtctcactctgccactgaggctggagtgcagtggtgccactatcgctcactgcagcctcagcttcccaggatcaagtgatcttatctcagtctcccaagtacctgggaccacaggtgtatgctcccatgcgcagctattttttgtattttttttttggtagagctggggttttgccatgtttcccaggctgatctcgaactcctaggctcaaggagttcacctgtcttggcttcccaaagggctgggattacaggcatgagtcactgtacccggcctgcatttatttctttaaaatcctacttcctctgtttcagatgagggatcagaaacataaatacctgcaggcagctggataggtgacctaaataagagaagcaggttgtatctaggggacaaatgacaataaacacaggctgcacactgggaaagttctaagggtggtgggaaccgtggttaacggggagtcagtgcatgtgtgcctggtgtaaagtggacagatcctacstcatgctgcaggctcagggtccacagatctgcagttggaaatgtaggttgttactgtgamatctcctcatttaaaaaaaagcgttgackccgccaggcacggtggttcatgcctgtaatcccagcactttgggaggccaaggtgggtggatcacctgaggtcgggagttcaagtccaacctgatcaacatggagaaaccccgtctctactaaaaatacaaaagtagccaggcrtggtggcggatgcctgtaatcccagctctttgagaggctgaggaaggagaattgcttgcacctgggaggcggagcttscactgagccgagatcatgccattgcactccagcctgcgcaacaagagcaaaactccgtctcaaaaaaaaaaaaaaaaaaaaaagttgactcattgaaacacacaaataagcaaaatgatcttcacctgacaaaacactcctgtaccctgatgcagttcccaggccaacaacttgtgaagtctgttccagactgttgagaaatgtcattttttttttttttttttttttttttttgagacagaatcttgctctgtcacccaggctggaatgcagtggtgtgatctcggctcactgcaagctccgcctcccaagtacacgccattctyctgcctcagcctcctgggactacaggtgcctgccaccacgcccggctaatttttttgtatttttagtagagactgggtttcaccatgttagccaggatggtctcgatctcctgacctcgtgatccacccatctcggcctcccaaagtggtgggattacaggcgtgagccaccgcacccggccaagaagcgtcatttttattctgtgctgtggtgtggtgcctcttcctttgcttttatgagctgcagttttgatcagcgagtccttgcgggtcagcagagggtcttgagaaaaggttgcttttacaaccttaagcaagttataaaagtcgtctgagactcagtttcctcatatagaagccagccgtcacagcctcagccttccgaagctgctgtgatgattgaacaatgtgacattttcctgagtgcctggtgaagtcgggtacatagaaggtttcaataaatgtgaatttctttccccttaacttgcattcctttttcttttctgaatgccgaggtgggtggatcatgagttcaggagataagaggctgtatcttaccaactgcattctgattttacaggagatcacagaatgaatttcctgtgtgggccatcctctcaaacattgctagtctcaggaatagtcagaaaagcacaggacctggcttttaatgatgacaaggactgccccctctgccctgtcttttttgtatctgtgattttcattcattaatggggtagttagtagtttttattttattttattttttttgagacggagtctggctctgtcacccaggctggagtgcagtggcacgatctcggctcactgcaacctctgtcttccgggttcaagcgattctcctgcctcagcctcctgagtagctgggattacatgcacacaccaacgtgcccggctaatttttgtatttttagtagagatgggatttcaccctgttggtcaggctggccttgaactcctgacttcaggtgatctgcccgcctcggcctcccaaagtgctgggattacaggcgtgagccaccgtgcctagccagtttcaccatgttgaccaggctagtctcgaactcctaagctcaggtgatccaccctccttggcctcccgaagtgttgggattacaggtgtgagccaccacacccggcccatttctctgttttatattgccatgatacctttgccaaaagtgagaaattaacattaccacatcgctatcaaagttccagaatttatttggactttaacagtttctcctcgtatgttctccttctgttccaggattcatccaggacaccacattgcacctagtttttgtttatttccatcgatatgtagaggtgtttctttcttttgaattgctgtagagcattccattggtgacaagagccattttgtccactctctcctgctgggcatttgtgctgagtccctttctcctttgaagttgcagagggtgctgtggtagctgtggatggggaaggaacctctgagtgggggggcgtgtgtatttccagcctcagtagtgagtgccaaatcgctctctagggggcttattctacctctcggtggcatccccactaggtgccaggcactttcctgctgtggacccatgaacgrgcagtgctgtcttgccttcaaggagtggagagattaaatatataatagtggccgggtgcagtggctcatgcctataatctcagcactttgggaggctgaggcagggggatcacttgagcccagggatttgagaatagcctgggtaacatgatgaaaccctgtctctacaaaaagtacaaaaattagccaggcatgttggcacgcatctgtggtcccagctacttaggagtctgaggtgggaagatcacctaagcccaggaggttgaggctgtagtgagctgtgatcatgccactcactccagcagtgtcttgtctttttcttcttcttttttcttgagacagagtcttgctctgtggcccaggctggagggcagtggtgctacttttggctcactgcaacctccacttcttgggttcaagcgtttcttgtgcctcagccttccaagtagctgggattataggcgcatgccaccaccactggctaatttttgtatttttattagagacaggatttcaccacgttggccatgctggtcttggaactcctgacctcaagtgatccataggcctcagcctcccaaagtgctgggattacaggcataagcccccatgcctggtaagactgtgtcttaaaaaacaacaacaaaaaaatgtgtggggtgtgtgtgtgtgtgtgtrtatatatatatayacacacatatattttatatatgtatatatatgaatgaaatggcaaaatcatctgccaagggctgcagctgactccagaggaccctggaggagactgacagacacagtgtgtgatagtggagggggatgggaagggtgaggggggcatcgggcttctggatgactgagggtatatgcaagtgcagagacagcgtgactagaatgtccaggcaggagaggggagatggacaggcactgcgggtcatgagggtttcagagagcataygcagtgtgtcccagctggtgacaaccttgctcttcctacaaccaaccatacacatttccatcttggggcctttgcatttactatttgctctgcctgaaatattctatctcagacatcagcccagatgtcaccacctctggggaggcctccctgataacaccttctatgagagcccctccctcctggtcacacaccatgctttgctcttctttggtttagtttttgtagcacttgtgattgccaagtgtaataaatattgacttgtctctgtctcctcctattagaatgtaattcttcgaggccaggaatttggtctgttttattcatagctgtatccccagctcccagaacagtgcctggcacgytggcttttacctactctttgttgacctaatggctgaatgaacggacgtgaccatcatcgtgagaatctgtggataatagcagcaaacatttaaacacaggctgtgygccaggcactgcactaagcacttggccatgaacttggtctccttaaatcctcatgtcaatgccacgaaactggccctctctatttgtctcagttttacacctggggacatggtggggttagtatttgaacctcatccaaccccatactccagttgggacccctggctgggtctctggccagtgctgggaaagagggaggcaggtagatttcagccccaagctgtggagtccagcaggcatttgtaccccgagtgggactcagatccttgtgttagggggaacttaggccagaagtgcctgggctagagggtaatggggaccccaggaggctccccgctcttgccccaatcctgccttstctgaaagggaaggaaggctcttaccttctagctgtctgcaacaggaactgccgggaggccacgctagccatcccccaactttggtttgcaaaactctgagcctggtggggaaatgaagggctggcttgctaaccacaaatgaagactcatttgcacaggcaaagcgggggcaggggtgactcctcttgccctagcggaagggactgacttctgcaggctgctgtcttgctggagccagtcatgccccaccattgagcctgggcactcggacacagttaccagcagtgggctttgtcgtcctccggcctcagtcttctcctttgataaatgggggggggaatagtgatattgtggcgattctgtggcactcaaatgaggaaatgcacataaagcctttgctcagtgcctgactcatggtgaatacttggggggatattcaccatcattgttaacagtggtagtggtcagaggtggcagtcaccatcagagcctctctcctgggctccgctccacatggcagccacattttaggaataatcctcagattaagcaaaagaggttaagtgaatattccctaatgcatgctcttcttttcctttttgagtagaatctgtccccaccctgcctttttttgagacacgatctcactctatcacccaggtgggagcgcagtggcatgatcacggctcactgcaacctctgtctcctgggttcaagctatcttcccacctcagcctcccaggtagctgggactactgatgtgcactaccatgcccagctaatttgtgtgtgtgtgtgtatgtattttttgtggagatgggattttgccgtgttgcccaggctggtcttaaactgcagagctgaagccattctcctgcctcagcctcccttagtgctgggattacaggcatgagccattgcgcccaggcagaatctaccattttaattacacttctgtgagtggtatgatatccagttgactgcgtgaggatcagatcccattcttgcaaagctagagaatgaggcagaggcctgccatccttgcagctagtgggagaccctgtgggtgacccattagccataagagagcaggctaagtgcccagataggaaggtgtcagcgtgtgaggcccaggcagccagtggtcagccgatacttgaaggcctcctgtgtgcccagcttgctgctggggccatgacagtaactsagggaaacaagtcacgcttgtgagatgtgatgaggacctggaaagggaagtccagaagcggaaggcaacctctcagagagggggtgtcttgtggggacttacagccaaggtgagggtgctttcctgctggcacccacctcgcagaacccattccttccctgagtctggtctgtgagaagagcccacagcatgaggataccacgtttggggttcagcaaccccagaatgaaaatcaccctttaaagaaggagtgctttacctttctgtgggggccacagcctggttgtgtgttagagtcactgggctctggagaagcttctggaggactggggccttctttcgcaatctgtccacacccccagggtcctttttcctggactgtggctccggtcggtacacgggtcctgagccagtattctggcccggggtggccgttccctgtgggtgaggaggaggcacctggaagcccctggcctctcctgttaatcactgacaaggtaaaaggatactcctgcctgtttttttttttttcaatttcaaaatttaaaaaaatcttttttttttttgagtcaggatttcactctgtcacccaggctggagtgcggtggtgtgatcacagctcactgtaccttccacctcctaggatcaagaaatgctcctacctcatcctcctgagtagctgggaccacaggcatgcaccactactcctggctaattattatatatatttttttgtagaggtgggaacttacagccaaggtgagggtgttgcctaggctggtctcggaattcctgggctcgagctgtcctcctgccttggcctyccaaagtggtggggttacaagcatgagccacggcgcccggcctcctgtgtgtcttgcctaacgattgcctttggcgatgggagtgctgaatgcttctggcatctctctgtctgcagaggcttacctgacttcaaaggaagcattcatctttagccagaagctagcaggttcaccccaaggttttctgagaggtcattcagggagcagctgctggaacgtgggaatggggacaggaggtaactggacttaccttgtctccgggccttccactgtgggccacccgcacagactaccctggtgtctttggcatcaaaacccagccaggtggccttgaatgggtgacttcatcttcctgggctgtctctggaaaatggggctttcttcccaagattggtgggaggattaaagagatgttgaggtcaactctgacacctattaaatgttcagtaagggggacctggtttgttctctgtcccagtaggtgtttctgccctgaacttgacctcggagggctcggtgttctgctggctgctggcagaattgtgagggcggtctgtgtgagagtcttagcccaggagccggcgcgggtggtgttggagaactctgggcctgcagctagactggcaggactcagaccccagcttgcccaacctgcctgagcctcagtttccccttctgcaaaatggagttgatgataatggtagttacttagggctttgggagagaccgctgagatgatggacagagagcactcgtcacgtggttgatagaccctggatctgcagagctgctgctgctgctgctgctgttgggagtttcagagctggggctccttgagggatgttcctgagaggaagattctggtaggacccacctgggacagggtgagatctgagcagggtggggaggagaacccactggaccaaggcatggctgccctttacaagggctcccaggacgasgacaatctcctttaacaaaacctcctgccagtccccagagcttcttggccatgagctgaggagtttttatttgttcctttggtcttttatggctaactctggattcctcttgggtggatggggaggcagccttggtccattgtagaactgggtactactgcaaaagtgccaagtccttgctgtaatctgctctctggagaacagaccctgtgggcaggggaaaggcccattgcccacctcctggtgtcatgaacactgtttttctcagtgggaggaggtggaggtacccaaagaggaggaagtggccttccaggtgccacttacttggtttggtgtcagctctgttattgattcactgtgtgaccttggacaagctccttgtctgctttgagccttagaattttatgtctgcaaaatgggtataataatgactcctctgtcgtagggtggctggcacgaaatgggataatttaggtgaagcagttaatatactaccttacgtacagctaacacttagtaagtagctgttataataataatgaagatggccgggtgtggtggctcacacctgtaatcccagcactttgggwggccaaagcgggcagatcacctgaggtcaggagtttgaaagcagcctggccaacatggcgaaaccccatctctaccaaaaatacaaaaattmgccgggtgtggtgacactacttgggaggctgaggtatgagaatcgcttaaacctgggaggtggaggttgctgtgagctgagattgtgccattgctctctagcctgggcgacagagcaagactcggtctcaaatataataataataataatcataataataatgataataattgaagataataggaaaaccatgttattacctatattagtgtcctgtggttgccataacacaagtgccacaaaatgagggacttaaaacagaaatgtacttattcccttgcagtgtggagcttagaagtctgaaatcaaggtgttggtagggcagtgctcccgctggaggctctaggggaggatccttcctctcctcttcctggcctctggtagctgctggtgaccctgggtgtcccttggctggtggatattggcactcccatctctccctctgagtgtgtctctgtccaaatttccctcttacaaggacagtagtcttgggttaggacccaccctaatccagcatgagctcatcttgactacatctgcaaagaccctatttccaaagaaggccacattcacacataccagggactggacttctatgtatgtttttgggggatgcagttcaacccccaacattacccgtttatactttctttccagggccaccaaggacaagaccagagtcattttcatcctgaattggtgtcaactagtgttttcataccctagagactatccaaatracacagctgacccaatccctgcatttctcagagggggaaactgaggcccagggaggtaaaatgactctcccaaggtcacacagtaaggtagtggcagtgggactggatcgtggatctcctggtgccctgtattggcccacgtgtcagccatggactcgtattcccactggtggagccaagaggtttttgctgtctgcaggggagagcactttggatcttggcttctcrtttcatccttcccttggtagtggttaagagtgcaagctttgggccgggcaaggtgactcatgcctgtaattccagcactttgggagggtgaggtgggtggatcacctgaggtgaggagtttgagaccagcctggttaacatggtgaaacgccatctccaacaaaaatacaaaagttagccgggcatgatggcacactcctttggtcccagctccttaggagactgaggcaggagaatcgcttgaactcaggaggctgaggtgcagtgagctgagattgtgccactgcactccaacctcagcaacagagcaacactatgtctcaaaaacgagtgcaaactttggagcctggccattcaggttcaagttctggctcaaccattgtgaccttgaatgagtcagtgactctctctgcttcagcctccccacctgtggaaggaagacagtcatctcagccttacatgagtgcacaggtgtcaggacccctgctgtgcacacgggcatgtactcagtgtttctgtgcatgtggtttcccttccctttcctcctgtttggttttctctgaagccgaaaggtccttagtaggaagttgaggaccagcgttctccatgggaagactcaacatcagttacaactctagaatttattccaggccatccaagttaaggtagttgtctgtattttgagaacctttctcttgctgtaaaaagcaaacaaaaacaaaaaaagacaaactagcraactcaaagaacgagaatacatatacatgcagtgctgcttcagatggaagtcagaaaagtgtgtgatcaaatgaaaggctgttgttgaaagggaagtctgcatttactcttctgccagttctcagactacctcaactccttgctgacattcctaggaattgtggtcccagctggcttctatagctgtgtgacctttgccttttccaaaygagtgggcaccctgcaggccacttcctctgggtttcagtgcccagcttatcaggaggctgcatgaacatctatttctagctgggcgggaaataggacgggtcctggcagaaggcggagcccagaggtggctggtagaatcccctgggaggagtaagggatgctctccgcagggacccccgtgtcgtgggtgccatggcaaagcgttaacaacaggcagtgcctagggagcctgaaccaaggttgggagtgtggtttccttctcagttccctttccgtcttcctgattatgacaagaacatctgtttggtaccaacatgtgttttttttttttttttttctccttgatgctgtgcatttttttccattggaatttttgttgagataattgaagaatcacataaagatgtaagaaatgatacagagagatctcatgtgaacgttacccaattatccccaatggtaatatcttgcaaacctgtagtgcagtatcacagccaggatattaacattcacaacattcatagaacccactaccagtcttattcagattttcccccattttccttgtacttgtgtgtatttagttatgtacaatttggtcacatgcatagcatcctatatctgccatcatagtcaagagactaaagcaatgtaatgatttcttacaccaattccatttccaaaattttaacatgtctgtctttgaaagatactaattttttttttttttgaggcggagtctggctctgttgcccaggctagagtgcactggcttgatcttggctcactgcaacctctgcctcctgggttcaagtgattctcttgcctcaacctcccagcttcccaagcacctgggactgtaggcacctgccaccatgcctggctaatgtttatatttttagtagagatggggtttcaccatgtttcccaggcaggttttgagctcctggcctcatgtgatctgcctgccttggcctcccaaagtgctgggattacaggcatgagccgccgttgccagcctgaaagatatgaaatgtctttattaaaatataacttgcagacataaaaaagaatgagttcatgtcctttgcagggacatggatgaagctggaagccatcattctcagcaaactaacacaggaacagaaaaccaaacgccgcatgttctcactcatcagtgggagttgaacaatgagaacacatggacagagggaggggaacatcacacaccagggcctgtcagggggtgggggcaaggggagggagagcgttaggacaaatacctaatgcctgcagggtttaaaacctagatgatgggttgataggtgcagcaagccaccatggcacaggtatgcctatgtaacaaacctgcacgttccgcacatgtatcccagaacttaaagtaaaattaaatatatatatatatatatatatatatgtaaataacatagatgtggtaaaatgcacacatggtgcatgtaaggctcaaggctttaagcatgggtccacctctgtggccattcctcgggtcccggtgacccagtcctctctttaggtgacaccactctgaccccatcagtgagtcttgcatggctaattggctttgtgcctctcttaaaggcttctcatttccctttatgactcacagaaccaagccgagggttttgcttccagcagacaactatttctaggtagaatttaatcatattgtcacgtttccactgattttattattttgcagttcctattgtatatggtgagtgttactggttttctttttgccaaaaacataaaatcactcttaacatacatcagttcaggtgaaaacggtgagttgatttaaagaaaactatcacataaatagtatcagcagtaggcagatacaacaaaccttataaggttgataaacaaatgtttgcagtttgagaaataatgtcatatggctccaaaccaccccccaaaactggtcaatccatgtgtgaggaaaaaaaaaaatctctatatagtctttgtataatgagagttttctgtgtaattttgatacacagtactggtttaaagaaaagcagaattagcctattaaaatattaataggctgtatataaagtaatgagcccttcctttattgccttaataatttttgttatatttgcataccatgagtactattttatatctaatacttattttaatattgattcactatttttaaacttaattttatatagaaaagaaacttgatttcatagtttagaggtgccaggtatgtattttttcaatatattttaaaatatactacagttaagacataacaaagggtgggcaccatttaaatttaattaccagcaggagggtgaaaaacaccaagtttaaatggcaccaaaatgatgaacatttaggctgggcatggtggctcatgcctgtaatcccaacacttgsggaaaccaaaatgggaggatcacttgaggccagggatttgagaccagcctaggcaacatagtgagaccttgtctctactaaaaagagaaaacttaggtaggtgtgatggtgcatgcctgtagtcccagtcacctggctttgggaggctgaggcaggagggtcccttgagcctacgagttcaaggatgcagtgagctgtgattgtgccactgcactccagcctgggtgacagggcatgaccttgtctccaaaaaaacttaaagaattatttgatggcccatgctgggggtgttagtggtgagcacataaagctcctcattttctcattgtctcctgagtttggaaatgattgagaaatgaaacatcggcaatcaacgaagggcgatgagatggctgcctggagagcatgcttagaattgagccctgacagctggcccctgagctgcccaccctgtcatggcctgggtggatgcccataggtgtctcagagcagcagtcccagacttttttggcaccaggggccggttttgtggaagataacttttccatgggccagattggcctggggggatagtgtgaggatgattcaagggcattacattgattgtgtacttcatttatattatgattacattgtaatatataatgaaataattatacaactcaccgtaatatagaatcagtgggagacctgagcttgttttcctgcaactagacagttctatctgggagtgatgggagacagtgacagatcatcaggcattagattctcataaagagtgtacaacctgggtccctcacatgtgcagttctcaataaggtttgtgctgccatgagaatctaacgccgctgatgatctgacaggaggtggagctcaggcagtaatgttcgctagacccctgctcacctcctgctgtgcggctcgattcctaacgggccacagacaggtgccagttcatggcctggggattggggacccctgtcttggaggcagctcccttccgagtggcaaggaacagggcagggcacgtggtcccttgggggtggatccagctagaacaagatgaagaggctgagtatcctcagttcctttttccagggagtggtcccttcctcccttggggatggggagtcccagaggggagagaagcaccagtttccccagtatcacttaaaactcttatctattgaatagttctgcatgaatatgaagcattagaatcacagacctaattatttgagcataatgatctgggaagaatctcttcacatggaagcaggacactgattttcgcctctgctgtcagcgcagtggcaacaactctgttgtttattatctttttaacaaagaagataagggcaggcccaccccctatctgcaggccaaaaagtaaactttatttatttatttatttatttatttatttatttatttatttattgagatagagtctcactgagtcgcctaggctggagtgcagtggcatgatcttggctcacttcaacctccgtctcctgggctcaagccgttcttctcagcctcctgagtagctgggattacaggcacccaggcgcttactaccatgcccagctaatttttgtatttttagtagagacagcatttcactatgttggccaggctggtttcaaactcctgacctcaagtgatctgcccacttcggcctcccaaggtgctgggattacaggcatgaaccactgcgcccggctgtaaactttactktttgcaaagttttttttcagatatatctctatagggtgtatgttctttttccatttcatagatgagaaaatagacagtaagccagaatagaggcttcttcatacagccaggagagaaagagctggatttaactcatgcctgctagatccttctagagctgggctctttctgctctaccgtgtgtgcctcggaagccccttttgtcattacatgttcttctgctgtgtatctcacctattcccccagctgccatgtcagacgctgctacatgtgtgaagtaacctaacacctttggtttttcttaaagcagggtccttggctgagatcagtaagcaacgctggggctttttacttaaagtgaaaccaccagcagctgggaagctggtgttgcaaggtggtacagaaaaccattcagcctagtagctaaactcaccttggtggagccctcctggggccacgtgatttttatttcatgttatttcatttggtttgcatgacaactcaatgataagcatcactgcttgtacagcggaggaaacagcaaagagaagggatgcaacgtgcctggttcctgtgcacccctggggagcataagccaggatttgaaccaaggtctttgtactccagaactccctacaaakrgaggctttctcctcttcttcccaggtgagctccagtctgcagaactcagccaggatgcatgtgctcagagaagcctttcttccccttgctggggaggagccccagtgtggactctgttgcactcctgatgtggatggagatgtggatattcacatatcatatgccggcctggacagggcctgtcctccctcccagactcggagccgtctgagggcaggactgtgtctgtctctgcagtgtggcatccctagcgctcagcgtggggttctgtgactgcctggttgactgaataactgaaagtcggaaaagaggttggggtatgtgtgggaaggtgcccaagccttctgtctgtctgtttgctcgcttgaatatgtcttgagcttccagagagaaatttttgttaagctcattgtcaggtgtggtgccccttgaggtcatgtatgggaattggggaaaaagccatgttcctggtgtcaggggtgggaggacgttccgtgggtgcagggagcctgagagagacagagaatcagtagcgggaggaggaaggaaatgggagcttgaagaacagggtcatggcccggccagcaaaggggtcggtggtgtaaagcggggagtgagaggaagctatgagacgtacggaggggccaaaagtccgcaaggctgtgccagaaggtgatgggtaggcagggagggctgagggagggtggctggagtggggtgccggcctttgaggctgactctaggagactcagtgtgtgggggtttgtttgcagggggtgggagtggaaggatgggtggtggaggtgcggtgacctggaagaccgagtgatgtggaaggggtgggtttcgaaatgagctctttcgaggtggtattcactttcagcggaatggccggggccactgaaatgtgccggttctgcccgcctggaaaaggggtgaatagctgaatgaccgaagtctaaatgcgctctaatggcagggcaacacgattgaagctgcnnnnnnnnnnnnnnnnnnnngcgtgtgtcttcggtttgtggtgggtgtggtgttggtctggtttgttgtctctctcgtgtctgtcgtgtgttgcgtgtgcctgtctgctgtccttggctgtggttgtcgtggtcgtgtgcgtggtgttgtgtgcggtgggcgtgttcttggttttttttttccttgggttttctggtgggtgtgttgtgttgttggtgctggtcgggggtctgcgggtgggggtgtctgggcggtgttgggctgtgtgttgtcggttttgtgtgtttgtgtgttttttttgttgttggtgtttgttgtggtttctttttacttgcttcgttgtctttttgtttgatgcgcttttcgtttgtgtccttggggtcggtggtttccttggggtggacctgggaagacccgaggtgatgctgggaagggggtggggttgtgcaaagatgaagcctcatttctgtggctgggttatctcactttcttcaagcaggaaactcggccactgagccccaccatgcaagagtgcatggcctgaggtctgctgaccacagcctactttgagaataaagtgttgtttcagtcactatgagcccttggcaaaaatttgaacccatgcagacaaagccctccttgaccatcatttgcccatctccttctcactagtagtgcctgttgtcagcaagttggtggaaatcttttggtaccctttctcacacctttacactcatacgtgcacacttacaaataggcacattccttcttagctgaatccagtacattcctgaaaacacactggagaggaacatttttggattgcaatatattacatcatattacacagagacaagcgctgatgcattaccaactgattgaaacaccccagccaatttccttagtatcacttaacaaccttaagtacctaaaatcagcctaccaatatttttcgcgtgaatacaaagcatctacagcaacaaatgcccaatttttgggtgctttgatgaacccattgctaagcatgtttgcaaaaagtacataggatactatacagtaatgtttctgaattaggatattcttctatcctccaactaccttgtactgtaatggaaaaaacaatgaaatgatctgcttaaaatactaaagattcatttaaattggaccctggttggtagtttgcttgtcagaagcaaatgctgggatgaaagaagaactcaatagaatgggcaggatgccgggtttgatgtgccgttggttgtgtgtctaactgcttctcttccattgcagacagacacgcctttcctttccttttctgtttctgtttccttttcctttttccttttcgtttttcttttgttttctttttctttctttctttttttttttgagaaggcgtcttgctctgtggcccaggctggagtgcagtggtgtgacgtcggctcactacaagctctgcctcccgggtttatgccattctcctgcctcagcctcccgagtagctgggactactggtgcccgccaccacacccggctgatttttttttttttttttttttttggtatttttagtagagacgaggtttcacgtgttagccaggatggtctctatctcctgacctcgtgatccacccgcctcggcctcccaaagtgctgggattacaggcgtgagccaccgcgcccgggcaccttttcatttttcttttcctttcttttctttcttctttcggatggagtttcactcttgttgcccaggccggagtgcagtggtgtgatcttggctcactgcaacctctgcacccccacaatgggttcaagtgattctcctgcctcagacttcctagtaactgcgattacaggtgcatgcccccatgcccggctaatttttgtatttttggtagagacagggttttgccatggtggccaggctggtctcaaactcccaacttcaagtgatctgcttgcctaggcctcccaaatcgctgggattaccggcgtgagccactgtgcctggcccacaccttcactgttttcattggcacctaggtgctcgtgaacctcgtacagcaggtctatgatctggattgtgcattttgcataaaaaaagagttaataagttatagtagacattcagatagtgagaatttgcatagtgatggacacttgtatataatatgtacatgtacacatggccatgtatgtgtgtacacacatggatgcatacatctagtctcctatttacacaggtcatcgaggagtttttgtcatgtcggtacataaggatctgcctccttaatgttcacagcaaataaattgagacaccatgttctttctttttttctgagacagggtcttgctctcttgccaggctggtgtgcagagttgtgattacagctcattgcagcctcaaactcctgrgctcaagcaattctcctccctcaacttcttgagtagctgagactaccagtgtgcaccagcacacttggctaactgcgtttattttttgtatttttttttagagatggggtattgctttgttgcccaggttggtcttgaactctctggtttcaaatgatcctcctacttcaacctcccaaagtgctggaattataggcatgagccattgttccctgtcccgtgttatttcttatgccttatatgtgtccagcttgattcagttgctaacaagtacagagaagcttctacatctttgttttttttcccctacatttttgttttgccaggtactattttaattgacaaacacacatgtacagtcgcacactcatttaatccccacaagagcactgtgtggtaagtatcactatcactcctgttgttcacatgaagaagcagaggcacagagaattgaagttactgtccaaagctatctgctataagctggggagctgggactccaggttccagagtctgtccacctcatcagtagcgacactgctcctcatgacttggatagctcctgggaacatgaatttgcagcccctgcrctagaatcttgttcccagcctcgggtcagaaaggtggcttgaatgcactgcgttsagcgcagtgggcctgaccgctctctgtgcagctctgcacccctgtgggtagtgggatcatcattcaccaagatgcccctgcctgatgtaagatcaaggggtggagatgtcaacaaaaatgcccaccgaccccctcagactttgctgaataccagatagaaaaccctggagagagctgcatattcttatgtggcttcttagagtcacttgcttgactatgagtcaaagttcaaatgctggctcttgcacttgtggctggtgaccctggccaaggtacttcacttctccacatctcagtttcctcatttgtaaaataggggcagtcatggtacctgcctcatagtgttcttgtgaggaacgatgagttaatacagaggatgctgttgtgccccactcagctcccattaccaggcttgtgctccatttcccagctgctaggagtgttgggtgtcgtggctcacaggtgccccttcttcagggcactgctctcactagaagaaatctgcatcacctaggaggttgtagtggctgtaagccaagccaatgactgactggcagggaggacaagaggactggcctcccttccttcaggaggacctacttttccggtgtgattcatgctccagacatccccccgccactccctatacagtcagggtgaagcccatccctaagtgggaccacagccttgtttagctttattctgctcgccatcccactcctgcactctcccagtaaacacttgagcaagaattcctgactcaggctcaacttccagggaaccaacctatgataacatgcaaaacattagcactctgcctaacacagagtaggtgctctgtaagagttttgctatatagcatttatttttatcctcaaggatgaggctactgtatctgtaagacccttgagggccaggatcaagtacatccagcagaacatcgggcttatggctaatgcttaaaaagatcatgagtagatagtccatgttcatggataggaagactcaatattttcaagatawcagttcttcctggcttcrtctatagattcaacacaatcccaaccaaaatctaatagagatacaagaaaaggtttttttcaattcacattcaatacagcacgaaacacttcacctcagagaaaggaaaaatcaaggtgtgttttttttctctttctctttcctcttccstctgtactcaacacttttgacaccagatgtgtatggttttccccccacgcatcaagcaaacaattctccattggacaccagtttggtgtcctctagttcagttcaattctgatactrtctacttggagctagaatcagattccacaggttgagagctcagtccctcaagactctgtcccatttcaggtgccagtcwcaagcccaagttgtggcctatgcttttgactgactggctataaattggggttccaataacccactscttggrtttgattaatttgctagaatggctgacacaactaagggaaacatgtataccagtttattaaaatgatattacaaaagataaagatgatcagcctgatagaagagatgcatagggcatagggttcccatgttctctctgggcatgccacccgccagaaacttccatgtgtttagcaaccaagaagctctctaagccctgtcatcttgggtttttatgagagcctaattacgaaggcatgattgattaaatcattggccattggtgaccaactcagtctttagcccctctctccttcctggacgttgggggtagggctgaaagttccaaccctctaatcacatcgttggttcccctggcagccaaccttcatcctgaggtatctaggagcccccagccctacaaaaagatacttatcactggagattccaagggtgttaggggttgtgtgccagaaaatggggttggagaccaaatatatgcagtcagtcctctgtatttgtggattctgcgtctgyggatttaagctatggtcgattgaaaatatttgagaaaattgcatcttactgaacatggacaaacttttttgttgtcattattccctgagcaatacagtataattatttacataacatttacattgtattaggtattaaaagtaatctagggatttaaggtatatggagggatgtgcataggctgtatgcaaattctctgccattttttatcagaggcttgagcatctatttggattttggtatctgtggaagatcctggaaccgatccccaacagtcactgagggatgactgtatatcttattaaaagtcacaatattacagaatcccagcaagttattctgtgggtagtgacaaagtgattccaaaggttatatggaaaggtggaagacatagactagcaaacacagcattgtagaacgaaatcagaggactgcaagacttactctaacgttccagtaatcagtacaggtgatgttggcagaagaatagaaagattagtagaacaggatcaagagcgcagaaatagacccacacaaatatcatcaactgatctttgacaaaggggcagaggccactcagtggagaaaggataatcatttcagaagtatgatgaataagctaatacttgtcttgggaagaagcaagagaggggtgttcaggatgataaagtcctggttgatgaaggcagatgcctgcagctcttycctggggcagggctggcttccaaagggtgcttgtttgggccctttggaagggggtgtgcggatgtgcagggctgcttgtatcattagaatggctgttagaatttcattctttctttcttaccatgctctgtctctctgcctttgtacatgtgcgtttgcatttmtctccctccttgtctgggtaacctgtgcttttctgtacctggtctctctgtccctctctgtctcccttggtctcccttgtctcctcctctgtccttcttcctctctgtcccctgctctgctcagtcatcagtaatttgatccctcttgaggtccccatttctctctgtccctttcctctttccaagaactacttattgggccccgctgtgtgccagctactctgataggggtggagctcagtggtgaagaagggtgtacaatccctgcgtgtatggagcttacagtctaggaaaggagggctgtggatccacagattccatctaatacatatttgcctctgttgagtgctgtggaagagaggtgcttggtatagatcatagcaggcattgggaggttttctgagtttggtttgattgagctgagactggaagggagagcttggcactaaccagactaagaacattttcagtggtgccaacaacaccactaatgtcctatggtaggaatgagtgtgacctataagagatgcttggaggggcctgtgtgggtggtgcaagggctgggaggcagatgcttaggccacgtggggttggaggggtcatcacagggctgtggttcttagtccttacagcaatgggacgtcacgggaaggcttgatcccaaggagtggcatgagcctgtttgtatttcgtaaggtgactgtggggataacgtactgctttaaggagacaagtcaggaagctgcctccatagacaagagataatggtggcttggattgtggtgttggccatggaaatggatagacgttgacagattccagagcaatttcagaagtagaattgttaaaatctggctattgctggaagacaatgttacmttgtctaaaaaagtttttctttagttatgtataatttttctgtaaggacagatgctcaccataggccagttcaaagatcccctcttggctgggcgtggtagcttatgcgtgtaatctctgtactttggaaggccgagacaggcggatcacctgaggtcaggagttcgagacaagcctgacctatatggtgaaaccctgtctctactagaaatacacatacacacacacaaattttccaggtctggtggcggatgcctgtaatcccagctactcgggaggctgaggcaggagaatcacttgaacccaggaggcggaggttgcactgagccaagattgtgccactgcactccagcctgggcaacaagagcaaaactctgtctcaaaaaaaaaaaaaaaaaaaaaaaaaaccaaaaaaattccctcttgaagacattttactgggaaagagaattgttagactagacagaaagagaaaagaatgtttgcttaaagtcactagactttcactggcagtcaactgggtgggtgaataactaactttggaaaacaaaccttaatacctttcaagtttttagataattgctaaagcagttatatcagccatgttgatttcctctaaaaatgaattccagtgcctagtgtctttaaaaagtcaaaggcacaagagaaaacaaaagtaaacaaggagactccgtaggattgaagatgtaatgacataatgagataagatgtatgcattttatttgtcttcaagtctactgtaaaaagatttggagaaaactggggaaatttaaatacagatgaggtgttaggttatgttatgtaattatcatcagttttgttaggtgtaaggttttatggttctataagaaagtgtgctcatttttttgagataaattaagtattttggggtgcaacatcatgaagtctgtaaaagtactcaagcttcccccagataaatgaaacaaacaaacaaaaaagtttcagtgcaygaaaaggatctttctgtttgtttgtttttgaggagtgaagataaagagaagagataaggaagactcagatttctggtttgggtgaagagtggcgacatgtccatcttttactgaccgtgcgttcttgggctctcagtgtgatagaaattgacaagaggtccaaagagttttcccagacaaggctttattggagcttatgcccaggcataagagaagcagcacaagagaaagagaattctcttcctggctccccgaagacagtcaggagaggaattttaaaggggctaaagtaggcagggagtgatatttaagcatgtagaagcggggaacttctggcacctgcacagtrtaacagcatagagagcttcttcctgtgttgcatatctcattagcgtgttaaatccccacccctaggcatgatgtttagtattataatgcagccaaggtggaggactggtcattcttcagatctcctgcacatgcgggcaatagggttaactcccttgagtaagatttaagatggggsccgcttatttttgtttcctcgaggtctgcaatcagtgggaatggccctttgaacaagatttatagtgcaaggtctggatggggtccccacttgttatgggtccccccagccagcttgtagtagaagtcctcagtggggtgtgacgggggatgagtcctttctctactttctctcaccttcatccctaatactctaccccacaaggtttagagataccacccccctaataatagggcyacccataattgagaagtgtctttagttactttttattttgaaataattttagactcttgtggacctggcaaaaatagtacagtttctgtgaaccattcatttagctgctccagtgataacatctttcataaccatagttatcaaaacctggacatggtcgctggtgcagtgctattaatgaaactgcagatcttaattggttttcaccattttttacatacactccgttttcttgttattttgcatttgttttggtgtgtagttctacgaaatcttgtcacgtgtaggtgggtatgtctaccaccgtacatgcacaggatgtagatgacgtgctgtttttttactcttttcacatggcctttttgttgttgttgttgttgttgttgagrcgaagtctcactctgtcacccaggctggagtgcagtggcgtggtctcggctccctgcaacctccgcctcccgagttcaggcgattcttctgcctcatcctcccaagtagctggtacaactggcctgtgccaccaagcccagctactttttgtattcttactagagatggggtttcaccttgttggccaggctggtctcgaattcctgacctcaagtgatctgcccgccttggcctcccaaagtgctgggattacaggcgtgggccaccagtgcccggcttgttttcacatggcttttgcccactgagctgtttctaattgagctagacccacggtaagaactcagaaagctttgagtgcatcccatcccctctcctctaacttaattgtctgctctcctcctctagctcccattgttgcctgtgaatggccacgaacctctcctgtgtttcactatgactctaagatgcctttgctcacctctgtggacttcgttctgtcctcttccttaattccaggccacagccacctcttcttgctgcaaagctgagatctcctttctcactctcatctccaggagtgctggagttcaaaggtacaccagggtttgataacactttcttccatggtagacaaggtggtccctgccactcccaggctcatgttttaccagcttgggagcagccgtggaggggaggttttaccagtagtcctggccaaayaagtcccaggaggatgctgatggtgcagctgggccatgtgtctgtccccgaaccagtcactgagccagggcacttgggtcattccctggcccctgytgtcgccttcagcttgtggttgaaggtggtgggggtgaatcagctctatctaaagcacatggaatgggtgcatcccatgaaaagatgattgttgttgtagtttttcagaagaaagggaaagaagggactggttgagcttgttgagcttgtgtctctgtgccagtccagagttcactggtcatcttgtagggggaaggaggagtcacctttgagtcagtcaggttgctatccttgcctggtaggttttgaccaggagtagatggagtcacatggcagcagaagttgcagaacggaaggatttcttacttgtttctgttatctattgctatacaacaaactatcccagtgtttagtggcttaagacaacaatcattttatttattgcacatatttctacaatctgggcatgggtggggactgggagagcttgtctgtgttccacatgttgtcagctggggcagctcactggggccagaggatccacttctaagatggtccagtgctctgtggctgttggctgggggctcagctgggctgttggctgagggcattgattcttcttccatggcctctccatagggctaacttgggcttcttacagcatggtggtctccaggtagtctgacttcttacacagaggctggcttcccccagagcacaaaatggaaggtaccaggcctycttaagtattaggccccaggctgggcccgctggctcacgcctgtaatcctagcactttgggaggctgaggtgggcagatcacttgaggtcaggaattcaagaccagcctggccaacatgatgaaaccccatctctactaaaaatacaaaaactagccgggcatagtggcacatgcctgtaatcccagctactcctgaggctgaggcaggataattgtttgaacctgggaggcagacgttgcagtgagctgagatcatgccactgcactccagactgggtgacagagtgagattctgtctcaaaaaaaaaaaacaaaacaacaaaaaaaaaccattagaccctgaactggtacagcatcatttatgccagcgtgccagtgctcctaacctttttggtaccagtgaccagtttcatagaagacagtttttccacagatggtgggggcagtggggggattgctttaggataaaactgttctacttcagatcatcaggcattagattccaataaggaccacacaacctggatccctcgcatgcgtagttcaccgtagggtttgcgcccctatgagaatctgatgccgctgctgatctgacagttggtggagctcagataatagtgcttacttgccggtaccagtccatggcctgggggttggggaatccctgatttatactacattttattggttaaaacaggtcacagagacaacctggattgaagggcagctggctatataaggcataaatactggaggctgtggcccattagtaacagtccattactctggactgttaccagagtcatagtttaccactctcttctcacaggccctgtgatatccagaacccctgtkaccatccccaaygctggggttggcctcttattattatttttaatttgaatcagttagtgccttcatttcctcttccccctttaattgagccacagagcatttgtagcttttgggactcaagggaaaaggtcatcaaggtcaaggtcaaccggacagttgacctttaggctgcctagagtgatctctagtgagcatcaatttggtctcttgtttttttttggtagaatagtctgtgcttatttcctgaaatctcagttgcattacaaaaattaattgtcctagtttaaaatgtgtctgtctgagaaacagggtgagcggaaaccccaaactcttcagactccaggggtttgtggggtggcagcaaatgcccgggtagggtcttagccctttgtccatttccagaaggaggggrcactgagtccagacgcagagatagctttgcgggaycctgttggggaaggaaggmgccaggctgtgcctgggctgcagttgtgtggctgcatcctcaggtggagggaactccagcttctaattggctcatgttaatttcattttagtggatatcatggaaataaaagaaatccgcccagggaagaactccaaagatttcgagcgagcaaaagcagttcgccagaaagaagactgctgcttcaccatcctrtatggcactcagttcgtcctcagcacgctcagcttggcaggtaggtgcatgtttctgtgcctttctccttccctgtgccttagtstcttcctgaagaagttcgctaatagcagaatgctcacccctgcctgctcactgatgtgtatttggggtcatggttttgaatcccagccctgcccctttctagctgtrtgtctttaggtgagtgacttaacctctctgagctgcagtttgctcagctgtgaaatggggagaataataatgcctatttcatgggggtattgtgaggagtatgttaagtgtctctctggctcatgctgagagctgaataagtgatgattagatagttttaacactgaaggccaggctctgttggatgaaaaatgtacgctgggctcatccctgtaatcccagcactttgggagsctgaggcgggcagatcacttgaggtcaggagtttgagaccagcatggccaacatggtgaaacccygtctctactaaaaatacaaaaactagctgggtgtggtggtgcgcacctgtagtcacagctatttgaaaggctgaggcacaagaattgcttgaaccagtgagccaagattgcatcactcccctacagtctgggtgacagagcaagactctgtctcaaaaaaaaaaaaaaaagagaagaaaaagaaaaatgtaacctgttttcytccagcagatgtggctcagcaaatctgaytgatctgaaggaactgtcctgagatcttctrttgcacacacacatgcactttcctcactttactcaggggcagaagcttgtatctactttcaagttcagtcctagaatttattgacttagaagtatatgtatattaattaagaaaataaatacgattaaaatagaccaaagtgggtgaggcagctgtcaaagttgagcaatatagggacatttacttttsggtcaaataacttattaatttctcattcattcttttactacatgtcttttgagcctatactctgtgttaggttgtgtacatgccagtgagctaggaagatgaatgggacctggtgccgcctttaagaagctctcagtcgacttggggagacagatgtgtgyastgggataagacctagtgcaagcatgatacagtgtgctgtgaatgtttaattccagggaagcttggcagagaaggtgacttttacattgggttttgaggcttcagtaggagtttggaggaaagagagggagggtgctccagggaaaggctgtggtgtgtgccagggcttggaggagggaaatagcatgtcggatgtaggaaatgaggagcgaatgtctgaytgatgatatggagggggagttggtagagatggggtaggagggcaaggcccgtggcggtgaagcttcacacctctgtctccttagcmccacctgcaggctgagccctgaccccctgttcttaayttggtaaggagaccagaagaasccgggtcttggaagccaggatgtgaactttgatatatatcccactcttggtccctcttccggaaccctaaattcaaggtcagcacagtgatggtcaagattttgattcacattccatcttctcacttactggctctgagacaaactcagcccttcagagcctcagtttcctccgcatctgtgtgggaagatgagagcagcagtctctgccatgggtgtacggactgataaagtacctggtgcttaaggagaggcttcatmgttccatgaggtgtttgcactgttagcttcattttacaggtgagatgaggcacagagtagggttaagtaacctcctgaatgttacacagccctgaagtggtgcagtgggacttgagctatgatcttccttttgccagatgccaagctcttaaccactcctcaatgccgcttattarcaagggtaatagcaaccatgggtattagcaagccatactctcctgggtattagcaagctctacttgctgtccctctgtgccatcttgattagaagcaggggagatactgacagctgcttagggttgtggtgcagattattccagattctgcattttattagttagcatagggttaaaagctaacactctttaataaaacaaaaagctaaatccctaagccagtggtactcatccatgggaagctgaatactgccctcccacgatgcccatgtcctaatcccgggaacttgtgaatatattatcctctatggaaaaggagacttggcgggtgtggttaaattgaggatcttgagatgggaaatatcctggactatctgggtgtctagtggaatcacaagggttcttagatacctgggaaggtcattcccagagaaagagatgtgaggatggaaacaaaggtcagcagatgagaggccatgagctaaggaatgtaggcagcctccagaagctgggaaaggtgagtaaacagattcttccccagagctttcagaaggaattcagagatctcatgcaaccagtctattttagacttctggcctctctaacagtctgaaaataaatctatattactttaagtcactaagtttgtggtcatttgttatagcagcagaggagactgatgactgaacctttgatatactttggcaccaggcaggtgtttccacctgttgatgtctccgtcatccctctcttctggtttaattactttagggtgggacctaagtattggggttttgaaaagccttcaagtgattctcctgagcagctggggttgagaaactctgctctggagttggacacctgggtttgaattcctcagctttttcatccctggagtcagtgtgctgccagggtaagataatggattcttgtttaaaatcctgtatcttccactgtctcagtgtgctctggctactgtaatgaaatgctgtagactgggggtttaaacatcaggcatttattttctcacaattctgggggctgggaatgccaagatcaagatgctggatggttgagttctggtgagggctctcttcctgacttgcagacagctgccttcttgccatgtgctcacatggcttttcctcagggtgtgcttggatagagagggagctctagtctctctttctcttctctaaaaaggcattaatcccctcatggaggccccactctcattacttcatctaaacctaaatacctcacaaaggccctacctcaggggttagagattcaacatatgaattcggaaggaatgcaaatattcagtctgtaatggctgctatgagctgtgtggccttggacacatgactgaasctgtcttaggttcagtggtttctccatgtgttaaatgggaatrtaatagtacttcccttgtgggatcaatataggaaaaacacttagaacaatgtctagtatatatatgtagttagtgctcaaatgatgttaacaatgtcatagtgatagttcccaccactccctccattyttagctgattccatttggcacaggaaataacccacttgtcatcsctgtggtacaaagctcatcatgaatgtgtggccccatctcagacaaaaagcaggtcctagggccatgacggtgtgaaaggggatgctttctttgccttctgcaaaactagaaaccagcataggcttctcccatcttcgtgatstgtatggggcagggctttgtaagcagacgtcttcccaggaattaacacagcatttctgttccctttctccactccagctgactctaaagaggatgcagttaactggctctctggcttgaaaatcttacaccaggaagcgatgaatgcgtccacgcccaccattatcgagaggtagttggcttttgcctgttgatttgcgtagttgctsattcctttattctgctgcctttagccaacatgggctacagggggraamaaaaaaaagggacattggttttttgaggctcgttgagtgtcttgtatgcaatgggtgcctagtagcggtgtgggctctacagtttttcaaataagagcatttccctgtgctagttttcagcgttggcctattggagtgagtggtgcattggactcgagatagaaacattcctggggtatgtgctgggggaaaacagggcttccttcttaaaggatttaataagagattcagtggactgatcaaaggacagatacagggtctggaattttccacctatcactccctcctgggttgatgaagacctcaagactgtctcttcagtgtcatgggagtctagatgggcattggggtgtgagttattttccttccactaaatcaaagtcctctactttttactatttttctttctagctttttggggattaatgactatcatcagaaggaattgwcaatgtaaagaaacctggcctttttgagttgaaatcttggcttagataggccttttccacactaggaggaaactgcttcccaagctgcccttgttagaaagttggaagactcctccttttggttccagttccttttgtgcacattccgtaggactcacttagacttgtgctattttctaattttctctttctctctttcttttgtctcawatttctttccagttggctgagaaagcagatatattctgtggatcaaaccagaagaaacaggtaagagtcattcagtttttttctgatcactttggatttcgatcctcattctatctttaaaccttccaagggggtgggagcatgacttgtcgggagcaaggtcctcactgcgtccattgtgatctgcggatgccatgttgggtcytggggttgaggatgacaaaatcctcctcctggagggagcctctattccgcagaaaattcaagtacagcctcagagatgatctctgccatggggcatttggacctcatcacaaatatttgagcacctttaaagtcctggtaatacagcagtaaccacactcctgatggcaccagcccatgctttgtgacaggagagagattgattgaccgtgaagaagtaaaccaggtggttcttttttttttttgagacggagtctcgctctttcgcccaggctggagtgcagtggcatgatctcagctcactgcgagctccgcctcctgggttcaygccattctcctgcctcagcctcccaagtacctaggactacaggcacccgccaccatgcccggctaattttttttgtatttttagtagagacagggtttcaccatgttcggcaggatggtcttgaactcctgaccttgtgatccgcccaccttggcctcccaaagtcctgggattacaggcatgagccaccgcgcccggccaccaggtggttctaagggctggtagagatgtgttgggtgatgtgataacgtatattcagtttacttgactttttcacttaaaagtacctcttggagaagctccctatcagtcctgcacaaagctctatgacggactattattattattttttagaggcagggtctctgtctgttgcccagactggagggcagtggcacagtcatagctcgctgcagccgtaaagtcctgggctcaaacgatcctcccgcctcagcctcctgagtagctgggaactacagstgtgtttcaccatgcctggcttatttactattattattattattattattattattattwttttttttttttgtaaaggtgaagtcttacccagacatttttttttaaaaaaagcaaacgcagttttggtttttctttagattaatgcattgtcatttcggaaatcatttccgtgttgatgcacagagcgctgctcccaatcctttatcattactgtgattaatgctgctgtggaaacctttgggtctatctttctgtaaactcatttgagggagctgtgagtggggtaaattctcagaaacgaataccagcagcacagcgtttgctggtctaatagtttgatagcgagaggtagcaatttgtataatatttctaccagtggggcaagagggcaccctttcctgatgatttattgtgccattagactttgatctttgttcatctgcaaccgaggcaaccaagtgtttttgcttaaacttgctttctttatgggtgaggttgagcatttttaattcattatgtttttgaggtatgattcagctcttgataatgtaatgataaaaactaccatttggccaggcgcagtggtgtacacctatattcccagcactttgggaggcagaggcaggcagattgcctgagctcaggagttcgagaccagcctgggcaacacggtaaaaccctgtctctactaaaatacaaaaaattagccaggcatggtagcacgctcctgtagtcccagctactcagcctcaggaggctgaggcaggagaattgcttgaacccgggaggtggaggttgcagtgagccgagatcgcgccactctactgtggcctgggtgacagagcaagactccgtctcaaaaaagcaaaacaaaaccaaccaaacaaaaaacaacaaaaaaacccaccacgacaagaaaaaaccaaaaaaaccaaaaccaaaaccaaaamcaaaccctaccatttattgaacaaccgtgtatttggcatgccagggattgcattgagctcttcagtccttgyctcatgttagcctcacgtgagrcaccttatttttttggtaaaatattcctttcattcattcttgatttatttatgtcattatcctatgtggatatgtcattatcccatctagatgtgtcattatcctarttaatatccaataactaaactctgtcagctctcttattttgttcctgaaaatctttccatcttgaaggtgacttcgtgtctggtcagtgtcctctgttacttgttagcttcagggtttgggtgagcttccctggtttcttcacatgcccgatgggaggatttggaactattaactaggaagtggttaaaagtctagtaatgttaggtcagccattagctcactccatgtttttctgtccacctgcctttctctccgtcctcttcttctcatccaaaatgccctgcctgctccgccacgctgggccaccctctcgtgttactgaggtggatcaaatgaggtscttgtgttggaagatttggtacacactggtctctttcagcctcggaggtgatgcctcttctgacttttctttctctgtggcttatgatgattcatagctgagattggcacagggctgagagagggagccaccctcagtgcctctctccacgcggtgctggtatggtatggccaatctggctctgaagtcggctcttcgtttgtgaggtcaagaaatggataccaccctcttgctcaggaggcattctggcaagtcctgcatagagatccatcttcccatcggctggtccaggaccctctgcagagagaaacttttctgtttctggactgagttcatccctgtgtgctcaccggcttcctctcctctacctccctcccagtgggcagagccctgctctctgtcaacatgtggaaaatcccacctttcctgtggttctgggaagcctggagggagctttgcaaaagaaactttgaccaagatgccaatgaaagagcaactgacttctgtcctgccaatttccctccctttcctgtcacccacgagacgaatcgtgtttcctgaaggaaaacaaaggagccacagaggcagaggaaagactgaaggcgagagggggcaggctcagggctggcccagcccgggcaatggacaagtcttaggtgttttgcttggcccaagcacsctgtttcattttttgacttttctagaggcaaatggtagcagcgggcatttgtttacagccttctttgcagccgtggctgtaataagcactttacatccttaggatatgctcttggctgacggttgagctaggtgctctcagacacgttttctatgtgaggacactgaggcccagagaggttaagtgacttgactaaagcagcccaggttgtcaggggtggcaccagggtttgcagacttactttccccactggtgttgcttttccttttttcttttttctttttttaaatgtgctactggccgagcatggtggctgacacctgtaatcctaacagtttgggaggccaaggcgggtggatcgcttgagctcaggagttggagaccagcttgggcaacrtggggaaaccctgtctatacagaaagtacaaaaaagttagctgggtgtagtggtgcasatttgtagtcctgctacttgagaggctgaggtgggaggatcatctgagcccagggaggtcaaggctgcagtgaaccatgattgtgccactgagctccagcctgggcaacagagtgagatcccatctcaaaaacaaaaacaaaacaaaacaaaaccaaaaacaacgaaaataaaaacaattgtgctgttgagagctgggggaaatgcagaaatcttcccttccccaccctgaccaatcaccttatgattaaaaaaaattaaaaacaaatgttaaaatttgttttattgtggtaacaacaatgaaacatagaacaacattgatcattttaaccgttcttagatatgtacttctgtgggatgaagtatatcatgttgtcatgctcccgtcaccaccatccatctccagaactttttatcatctcaaactgaggctctgcagccattaagcagtaactccccattgattctctctttagcccctggaaatcaccactctactgtctgtctctctggattggattgctccaggtacctcatataagtggactagcagaatattcgtccttttgtatctggcttatttcacttagtgtaatgtctccaagtttcatctgtgttgtagcatgtgttagaatcttcttcctttttaaggctgaataatattccattgtacagatagaccacattttgcttatctacttctccatcgatggacacttgagttgcttccacgttttggcaattgtgaatagtgctgctgcgaacatgggtgtacaaatctgtttgagtctctgctttaaattcctctgtgtatatatccagaagctgaattgctggatcagttgctggattgctgtgtatatatccagaagctgaattgctggatttattttgccggattgctatactgttttctgtagcagctacaccttcccaaggcagtgcacaggtttctgttttcttcatatcctcaccaacacttacttcctttccctcctctgcccttgcccccttggcgtataacattggatttgcataagtagaatgtgcacttccctttgtcctttagccctggcagggacagaggaactactctaccaggaggtggcaaagggtgagggggttgcaggtggaaggcaggtgggtgagtccatttatctcattcagcgtgaatgcaaataggcttcctatttgagactccagaatgttagagtcacctggggaagctttggcagagccacggcagtagtgattcgggttttactgttctgggcatggcctctggcgttgcaaattttttaaataagattcttctgtgaagctggggttgaaaattagggctgtctagagggcaattttcaaatctgagcatgcaccggaatcccctggaggatttgtgaaagtggaggctgctgggctccatctcacagtggctgattgagtaggwggtgggcagggctcaagaatttgcatttcaaccaatccccaggtgatgtagatgctgctggtctgggagctacttagagaagcagaactctggggctgcgctgtccagcagggcacccctcaccacaggtggccatttcaacaaaacaaaacaaaatgaaataaaatacttagctcctcagtggaactagctgcatttcaggggctcagcagccccgtgtggctagcagctactacctcagacagcacagatgtctccatcattgttgaaagttctgtcagatggtgctgaggtttaaatctcagatctcacactaactcattgtgtgaattggggtaaatgatttaatttctgtgggcctcagtttcctcatgtgtaaaagataaaataatagttcccgcctcccagggcagatgtgaggcttcaggagttaatatgtgaagggtgcgtggacctgcctggctcatggtaaacacttgacgaatgtttcttattgccattgttgctacaaaagagccgggggcagtggaggtgccggcccagcctcagcatggctggtaagtgtcacggggctgccatccttaatsgtttggtgatggctgcctgggtgcgggagttgaagaaccctgggggcctcccgggctgagcagggaggacactgtgattgttcagtgctgtctgccatgggagagggaggggctgttggtaactcattcagggaatagttgccgtccttctccaaagggattcccttgtttcctaacccacagccctaggttgagctcccaggaaacatgatctgagacgcaggtttgtgtgcaggaggcttactagggagtgcagggtcatcaccctgggggaaggaaggcagctggaacaggcagctggggagtcacaaccatggcctgggcacacctgatggggagctctgagcatggcctgtggagctgtcctgaattgagactagagggccaggcctttgttcccttgcgtggactgggtcagagctggctgccttggaaggggctttgacctgggcgaggcactctctgtaggggatggcaggttgcagagaggggtgaagctgagccgttggcttcctcccctgcagcgatgggggctcagcctgcctgtgctggttttggtcgggctgtgcagcacgacacacacacatccagaggtgggagtgagggaggggctcgcctagggagaaagcgggtgaggctgtcccagagctaggagcccaaagaagctctcagcctccagtgtttacattgtaaggggaggcctttggaccaggtgggctcccatgtcccaggtgcttggatgctcaagcccctggttcctgggttttctccacttgttcttgagcagctgctctggcaccccaggcccctcagtctctctgttcctggrcatgggatggttcctttgccctgctgctgtctgggctcctggggggccctggcctctyccttgctcccaggatgggctccactggggcaccagcatgagaggacgctggcctctcccttgctcccaggatgagctccactggggcagcagcgtgagaggacgctggcctctcccttgctcccaggatgggctccactgggcaccagcatgagaggacgctggcctctcccttgctcccagggtgagctccaactggggcaccagcatgagaggacgctggcctctcccttgctcccaggatgagctccactggggcaccagcatgagaggacgctggcctctccctttctcccaggatgggctccactggggcaccagcgtgagaggacgctggcctctcccttgctcccaggatgagctccactggggcaccagcatgagaggacgctggcctctcccttgctcccaggatgggctccactggggcaccagcatgagaggatgctggcctctcccttgctcccaggatgagctccactggggcaccagcgtgagaggacgctggcctctcccttgctcccaggatgggctccactgggcaccagcatgagaggacactggcctctcccttgctcccaggatgggctccactggggcaccagcatgatctggctcctctccccacgacccctctcgctgccgctctggtagcgcctgttcccactgctcctccaccttcatcctgccctggcccagctgttccttggaccactcccagggctgaggcagaaaggttcttgcaagcccctggggcaacttccctagcctgctggccgctgtgcccagccagccccagctggcccaacagggactttttctgccctcaaggtctgtctgtgaaagcygtgggtgctgtccctgtggtaccagtaagtgggtggggagcatcttgtcatttgaagtctgtgctgttacagaggcccttagaaccagaggaaaggctggaggtggggacacaggatggccagagtcacactggaccgtctccagggcagcggctgggcagtgacgygctacttccttccgcatgccacagcagaagctgggaggatggtacagggaaactaggyggttttctcctgcaaggtggggcgagcttcctctcttgaccactctgtctcagctctgctggacacttggctccagccagaagggtctggatctcatattcttgacccacccaccccactaatttcacttctccttcttgtgtgagctactcgcttggaggcagtcaggtgtggtcattatgggcacactgggttggagtttgaggctagcacagataaggtaccaaactgatcggtgcctcagtttcctcacctggaagatggagatgatcatggtacctgccttgtaaaattgttcaaacatcaaacaggtgaatgtgcatataaggcaccacctagaacaacacctgtcacctgataagcactattgaagtttcagcttttgttactattgttactgctgctgctgctccttttgcctgggacgtgttctcccttgcttccctcccttttcttttttatttttggagatggagtctcgctctgtcacccaggctggagtgcagtggcgtgatctcggctcactgcaagctccgcctcccgaattcacgccattcttctgcctcagcctcctgagtagctgggactacaggcgcctgctaccatgcctggctaattttttttgtatttttagtagagacggggtttcaccgtgttagccaggatggtctcgatcctctgacctcgtgatccgcccgcctcagcctcccaaagtgctgggattacaggcgtgagccaccaccgtgcctggccctcgcttcccgcttcagctgaacctcactatgtggcttcgaagaaacactcatgcagattcctgtgaccgagcactggaatttgattcaaatccaggctctgctgcctgccatccagctctaagccctgagttgtgtacccatgtgacaccccacccttggctgttctgagccctgggggtcaaccatgtgtactttgcagaaggtagaatctggtgaacaattaggcaactttaatgcctggatgaccccagggcagcctggcacacagtaggtgctcatgtaggccttgttcctttccacttcccctccctggcccttagtgaccttgccttgctctgaaccccagtggcattaaaagaaacctttattttttttacttatttttgggggtgcagggggtccccacttactctgcatccctcttgtctcttcacagtgtcagactagagtcaaattcagctgggtctttcccggctgattctgccaagcccgtcctgtggttttggttcctctgggtggcaggtagagtcagtaggagtcttgttcatccattcatgtgtgtcgctaattaggtgacaaagcatttggctacatgaagagtgtcatagttactcctgatgtttacccaggcttcattgaatttcttcactttgacattcagagtcctgggcagaaatcacatcatgtcaacacctatattgggcctttggcatttctgtggcattttgtattgagattatctggtcatttgacatcattttctgcccacactgaatctcctgcaagaccttcctccatgaccattcctgaagggtggagaccagcccttctcactgggacatcaccctatactggggatctccagtgtaggtgcctcctcattggggcatcactgtacgctataaatctcttatgtgacctatgtccctggacatacctgaagggtggagaccagccctccttattggggcatcaccctaccctgtgagtctsctatgtgacccatgtccatggacattgcttgagccttgctcattgaagtgtcacccttaccttgactcaatgtcttgttcccagttagtggtccataaataactgttgaccaggctctctcatagagggctgcctgaggtgggaactgatgggagcagctaaatcctgtgctgttgaaaaccctcaaggtgacagarctgggtctccctcttttgcagcatcagtctccgagagttgaagaccatcttgcccctgatcaactttaaagtgagcagtgccaagttccttaaagataagtttgtggtaagtttcatggctcagcctgggaattttatgaatgcggagtgacttagcctctctcatgaagccgtggcttgcctttgagttccrtggaatagtgcacaagaaaatcctttgcctccagagtacatcttagttcagacagagggatcatrgacatatctgaggaccatcgtctcaatcctagcagagaatgtaatcaataaagaccatgtttactgagctcttggacttggaacatctaccctcagacctgttttccattagtccagctttccctatttccctgaccatactgcagcccattttttccctagtgaaatgaatgcatgtatgtcttttggaaaatattatgaaagattccttgtgtagggtaccaggaccgtggcattttgtatgcaagtcctggtagtgwagctgtcagagttggctcttttttcttytgtttctccaaccatccatccttccatacatcattaaatttattttgttgtgtaatcaagttattggtgggtctgggcagtaaagccactccatgagtgatgggatatagtagagcaggtgaggcaaggatggagacaatgggcaccgatttttgcttacagggaaatactcattcttcttaggaaatgagcaaccctgcatccaaacagccccagttggaggactccaatgcccattttcaatatcagctccattacaaggttcctcagtgcaaaaagctcatttcatttttgtattaatgagctcctggaaaaattatcccattttattgcttatcaagcatcctttgacctgcccccaatattccacattaatccaataatagaaaaagagaaaagggtaggtcagaagaggagagagatgggagaagcatttaccattgattgctacacagtygccatttaattctttatcaagtatttactgaaccaggtgttttgcaggtatgttgttcactttcagggaagccctaggagcatagtagtggttctcccattttacaggtaaagaaaactgagggtttgaaagggtcaaggaaattgcccaaagccataaagcaattaattggagctgagttctgtctgactcccaatgctttacaaaatgacctatatgtacgtactctacaaatatgtctgaagttggaagtccaaagagagtgttttctgcccaaaaaaggaggagttacgcatcatgtctcttggaaacctggctgagactcttcccttttggggctcaaaggagggtcttacttggtaggtgtctctgtgagtatgttttcccagacagggggattagggaacgtgtggagggttttgattcagaggaatatgaatttgattttagccaatgttgtagaaaagccatgttaaatagcatgactttttcctttcaaaagccatgacactgaaacaatgtggtcatagctgtctcttcagcatgccaataaaatagcatgccatttctgaaayaaaaattattctataaatagcatggagccattcttacggtggacatcaaaaatcatgtggtcacttttttcatatttacaggaaataggagcacacaaagatgagctcagctttgaacagttccatctcttctataaaaaacttatgtttgaacagcaaaaatcggtaagatgattcttgagcaagtgatcaagtgatgtttctgttttccatgtatttccaagtctggcatgttcctaagaaacccacaagaagtgttgaatctccattttagtcaaggaaacataaatgagaatgaygaaagcataccattttcatccattagattggcaaaawtctttaaccatgacagagctgtgggcaaaatgtagagaaatggtgttcatatgccttcctggtggwaatgygaatggccataagtttgattggaatttgatctgagtctgttaaaaaagtgcaactcactctactgcattatttcattctgaaaggaaatttagcaaatggctgttattattaatagccatctccagattgaggaattatatatatgtttcttctttttacacgtttgtttgtttgttttgagatagagtctcactctgttgcccaggctggagtgcagtggtgtgatcttggttcactgcaacctttgcctcccgggttcaagcgattcttgtgccttagcctccccagtagctgggattgcagacgtgcgccaccacgcccagctaattttgtatttttagtagagatggggttttgccacattgggtgggcaggtctcgaacttctaacctcaactgatccgcccgcctccacttcctaaagtgctgggattacaggtgtgagccactgtgcccagccctttatatgcttttattcatattttttatgagggcatattttttgattaaaacaatagactatttaaaaattaagagggtgtatgttttgatctgacagtggcatcctggggactctgttttatgaaagggaaaacatcggggcctgagaatatattatcggattgcttattgcagcattacttatgctggcaaagtacctgggcaccatctgaatgtctctcaatggaggaattgctgggtaaattatggtctrtccataytrtgtgacattatgcagctgattaagaagcatgtgtcagttctctttccattaatctgagatgatatttgtgacattttgtgatgaaagccagcagcagatttacatcaggagtcaggtctgctattttgttaaaaatcatagaatacaggccaggtgcagtggttgacgcctgtaaccccagcactttgggagcccaggcgggtggatcatttgaggtcaggagtttgagatgagcctggtcaacatggcaaaaccccatctctactaaaaatacaaaaattagccaggcatggtggtgtgcacccgtaatcccagctacttgggagggtaaggcaggagaatcacttgaacctgggaggcggaggttgcagtgagccgagattgcactactgcactccagcctgggcaacagagtgagactccatctcaaaacaaacacaaaaacagagaatgcaataatcctccttttgctcctttttatgagcaaggggagagtatggaagaaagcacctcacatttaatgttgattttgtgtgtgtgtgctggaaggggttgggaagataggcaggaaggatagttaccttttctttgcacagctcattttctgtgatatgttccaagtaacatgttacctttgcaataaaaagttccatagagcataaagttttaaaattgagactattctgtgcgatgcacctagcacagtacctggtaggtggcacacattcaataagtaggggctgctgttgttgctgtcaggaaagggctttgcagactgcaaaagagttcccagagaaaggtgtgagggcttggggagtacctggaacttggagtcaggtggctgtggtttctgcagttagctgcatgatcttggatgaaccactgactgctcctagcctcagtcttctcctctgtgcaatgggaggttgggagttgtgaagacaggcatttttaagtgatgagcatgaatgttcctagaagacagtcattaattgctttctgcatgcagagctgtgggctggccacacagtgaggccacctgatgggtgaccactggccgtgggactttggatgtatctgagttagagaaatgggrgggccatttcctatctgcccagattwggggaaaacatatttcwtagagtggatcattgaattgcaatgtgttcattttttctcatatataataattagttatttgtttgccaaatgaaatagaaagattgcaggcttgggagttgggagaactggattctagaccmacttgacctctaactgaccaagtaatgttgggggaagccatctctgtcctctcacttagccttttctataaaatgaaggtattaaatgagatcaatggttataaaacttttaatactctttaatcccckctcctttagacaggaaactgtaacaaccacaacaaaaaccatgattcataaaagcttatcagaatactttttaaggttaaaacctgtaactttaaaaatagtccttgagaacaatgacgtgtgtcattgaacatagaacatgtcatagaayaatgatgacagtgtgcgtatgaaatttggaatggtgacgattgtcatcttatgcaattgaccaggattgagaaaagctcgatttactcaagataagtagttgcaaataacagtttttttttttttaataatagtttaccttgaaatttcaagatgctgtgttgtcagacagatgtcaggcaaagtttgaaaataagatttgcacatggctgggagcagtagctcacgcctgtaatcccaccactttgggaggccaaggcaggaggatcctttgagctcaggagtttgagactagcctgggcaacatagtgagaccyagtctgtattattaaataatattaaaaattaaaaaaagaagatttgcacaaaagctgtttcacctgctaccagattaacccattcattgatggtttccactgtggtaacattccacatragaggtatttcaacctgtactttaattatggctcttattaaggctagtctgtgtgtttgtgtctatgagggagaaacataaattggaatcagagttttacaaaatgtcagaaccctctggggtgccctagattgccccgtgtggaactttgtatggcaaagattctgccgataccaaaggttgacccctggtggccagaatgccacattgagcctgcccctggttgtacttgatctaatggtttaaataygttaaaaattaattgcctacrtttaaaacttgagagattatattatatattaaaatctagatatttggcttcccttaggaaaaaaatcgagatctggctataaatagggtcacatctcgccatggaacggtccacgttctctgtattgacccagccccatacagctctgtctgctcatttatgttgcttacctgaccccaaagaagttttgctttggcaaccctcatctccactgtttgagggtataactctccagtttggtcactgcattttaaaaatttaatttagtgacagatttgaataacaaagtcccaagctatgtagatggcttctggccagctctaagaacctcactgctgttgtgtaggtaaatgcccatcccctaacctgttagcaaattgtttacttcctgttcctggctggaagcacagggcagagaaaagtacctgttttgtgatttggggggaatgagggcctagctggatttctcaggctcctgcaggagacagagctatttatggtgacttataatccccagaactaaatccagggagtgggttcatgcttatcagyagccaaatggtttccatcgtgagcttgctagttcctctttgtgtctaaccacctgcctacgttccacctctcgagcttcagagtttccaaaagtttggcagcagcaggaggataagaaatgtaatctcacgtttgtgtctccctggtgaggggatatacctctaactaggctgtaataacagtatcattaacaaagatgatagccaacattttctcaggtggactatttgctaggcactatcctatgtgtttttttttttttttttttttttttttttatttgagacagagtctttctctgttgcccaggctggagtgcaatggcacgatcttgattcactgcaacctcttccttccgggttcaagcrattctcctgcctcagccttctgagtagctgggattacaggcatgcaccatcacgcctggctaatttttgtatttttaattgaaacgggktttcaccrtgttggccaggctagtctcgaactcctgacctcaggtgatcctcccrccttggcctcccaaggtgctgggattacaggtgtgagccatcatgcccaacctgctctatgtgttttgtatacatttaattcccccctagaggcctgtgcaagagctactgttgttattgccattttagggattaagaaactgaggtccagagaggttactttgctgaaggcctgtttactgcagggtagtaagctgcagagctaggatttgattttctgcccaactttgacgcatagccatggaatacttcttaatttttgaatcctttgtattaaagaaaatgtaaagcatatagaagtagagagaatagcgtaacagacccccatgtatcatcagctgacttcagccattatcaccttgtcactgccctcacccaagtcccttttctcacactttgcagcagacatcaagcagcgtatcaggtcatctgccaatactgtaatttaatacctggctacgtgactgctaccctgctacctcctgatcaaacctgtgaagtcccctgtggttacagcattcttacataaaaatagaaagcacttgcaaaaaatcaaaaagaaaattgagaagsctgctaacgtatctctggttgttcctatgatccagtaaggcattgaaggattattctgccggattttacatgggtgtgagcatgggggaagtgagtgatgagcgttctgtgacgatgtttgtggaggagctcagagatcttgcagtttattcttattgtcagtggctggcaagaggagagtccacagtggagaagttagatagaatctctggttagcttttctttttctttctttttttttttttttttttttgtttttgagacagggtctcactttgtcaccgaggctggggtgcagtggtacaatcatggctcactgcagcctcgaactccctggctcagatgattctcccacctcagcctccggagtacctgggaccacaggcgtgtgccaccatgcaggctaatttttgtattttttgtagagacagtttcaccatgttacccrggctaggcttgaactcctgggctcaagtgatccacccgccttggcctcccatagtgctgggattatagacatgagccactgtgcctggcctagcttttctattgatgagattttacccttggccttccagaaccaaatggttkctacagcctaagtaccactgagtgcgtaagaccagcttcggttgtgaaagggcgtgtgccttcagccacgtgggaaaactccattcctttccctccctttcttagtgccctggcccctgcttctgtgacccccgcctctggcatggccccttctcttgtccagctggtaacttctcctggggcccgactcagagatgacatttccctgtagccttttagctaccagaagaaattagtttatctattattttagtcactcatccagtaaatgtgtgcgtgacccaagaggcacagtggttaacaatacagctgtttctcctgacytcactggccctttgctggggtgggaaggtcctgggatgttgcccagagtgacataaggcccagtgccacccctgtcccttggttaggtagaatctgaccacataaccctccatggtaatgccgaacataaattaactgctgcctccacggtgcacccgtagcatctagaatattctgtgattgctggaatctcatttattgtgtgtacatatgtacgtgtagtgtgggatgctagagatttaccaaggtgggcctgggttgaaattctggcccttggacttgttaggagaaaagtccttgcctccctgggcctgtttcttgtttctgaaatggggcttattttactacctgatgggatcagcaggaggagtgactgagactgtcaccgtcttgccccagctcatggagcccatgttcatttcctggggccgctgtggcaagtactgcaactcgtggcttaaaaataacagaagtgtcgggcacggtggctcacgcctgtaatcccagcactttgggaggccaaggcgggcggatcgcgaggtcaggagatcgagaccatcctggctgacayggtgaaaccctgtctctactaaaaatacaaaaaaaattagctgggcatagtggcgggtgcctgtagtcccagctacttgggaggctgaggcaggagaatggcgtgaacctggaggcggagcttacagtgagccgagattgcgccactgcactccagcctgggcgacacagcgagactccgtctcaaacaaacaaaacaacaaaacacagaagtttattccctcactgtactggaggttaaaagtccaaaatccaggtgttggcagggccacasccctcggaaggctccagggaaggatgtgttccagacatctttcatggcttctagtggctgccagcaatgcttcaagcattcctcggagtgtggacaccgcctggctgctggtggctgccagcagtcctacaagtgttcctcggtgtgtagatggcattgctctttggtgtgcagacaccatcactcctcggcatgtaggcgtcatcgcttcttggcgtgtagatgtcattgcatcgctccttggcttgtagatgtcattgcatcgctccttggcttgtagatgtcattgcatcgctccttggcttgtagatgtcattgcatcgctccttggcttgtagatgtcattgtgccagtctctgcctccatcatcacatggaccccttttctctgtgtgcttctctgtctccaaatctccctcttttttttttaattttttttttttttttttttttttttgagagggagtctcgctctgtcacccaggctggagtgtagtggcgccatctcggctcactgcaagctctgcctcccgggttcacgccattcttctgcctcagcctcccgagtagctggggactacaggcgcccaccaccacgcctggctaattttttgtatttttttagtagagatggggtttcactgtgttagccaggatggtctccatctcctgacctagtgatccgcctgcctcggcctcacaaagtgctgggattacaggtgtgagccaccgtgcccggcccaaatctccctcttttaagaagccaggcactggattcgggtccaccctaacccagcaaggcctcatcttaacttgattgcaccttgcaaagaccctaattccaaagaaggtcatgcccatgggtactgggtattaggacttggacatatattcccggggacaccatcctatacataatactagctataacttyttctatctttagaacgtcttccttgatcacctgtgccccatactgtcaactacagccccatttatctgccccctttaaagtaacctactccaagagctgtctacgcttcccttcttcctactgtctcttgagtctattcccgtcttgtttccatccctgcctcctagagcacttcatcttggcacgtcagccatcacctccatgtgttgcgaatccagaagtctgccccgtggtctttatcttgtccactcagcagcacgtgtcaaagctggtcactctctccttgatgttgtaacttgcctttgggatgcccgactgtcttccttatcttgcctctcactgttggttctcttgcagcgtttgtggctcttggctttcakttgttctttttcattctctgtcctgctctgcgtcccaggggccgattcctgcaaacacgttcccaggtgcctgtgccaatgagcttccggttgcttcaacaagcagagtgtccgggcakggagttgcaagacctggcagaggaggggaagccaggtctttcctggttctgggagcatctgtaccatggtggtacctctgccattgtccgagctccctgagtgggggaatgcggtgcgggctttttctgtgctttgttgaaaggaatgtaaaggaaggagagggctgaagaattgcatgtggtggtcagtgaggggggccacacactgggctccctccagatgtaaataagctgggtgtggggctttgggcttggaagtgttctagcccctgatgccttcagcagcaggctgacttggtgacctaagcagtaaatgagtccaaatagcaacatgccctgtctaaaatctgcaacaccacccctttttaaaaagaaatacctatgctgtaaattacacatcaacgaaaggaagtacttctcagtttgcctaaaaaggctaagtttgcggctcttaaccttttggtgggacctactcctttgagatgctgattatgtctccagaagaaacacacacccacacaaactgatgtggactctctgatgcttctcagaggcctgcgattccctttctagaaccctgatagtccccatgacgtcctgggctgcaaggagttcagcaagaggaccctgggtcatctggggtaggagatgttttatgtcgttagcattgatcatgtgatagtggatacatttccctaagtgcttatccaatcgcagtgtcattgaagactgttgaagcaaggctacctgggcagaaatggacaagatgtgggtgtgcagggtgcctgtgtacaatgcacagaaaatgggctggtgcaagtagaagctggagggaggggtgctccatggcgccccccttggtggaagagcctcttcatcatgcaacagttggcacggcagtgggctgtgaagagaggagctgaagcagtccgatatttctttcgtcttcttgccttcgaagattagaaatgcatctttgaaatactaaagatttgaaatgttgcctgtaatcccagctactgagggggctcaggagggagcatctcttgaggccaggagttcaagaccatcctgggcaacatagtaagacctgcatctctacaaaaagaaaaaatattagccgggcatggtggcgcatgcctgtagtcctagttacgcaggaagctaatacaggaagatcatgtgagctcaggagagtgaggctgtggtgaactatggtcgtgccactgcactccagcctgggtaacagtgagaccccatctctaaagaaacctggcagtgaggatatagaaaaaggtatgtgtaccccagtggaggtgcctrtctcaactgttttgagagcaccttggcagaatttatcaaagccaatgtgcctacaatgtgctgtgtctacgcgcttttccttctaggactctactctgtagaaaaactggcacaagtgggcaaagatagagaaataggcacacagggacacttaaaaataatactagatgttacaaaaatcaagtgacatgcttattgtggaatacaatggtttttcaaagaaaggaaacagggttatttgaggttgcagaataatatgtaaagcttgaaacacagcaaaaaattgtgagatgtacgtaaatgttataatatgatatgataccattaaatgaatatccctaaaacaaattctagaaggaaacctatgaaatgcttaagggtgactgcttcttgggaatacgactgtggagggaatgaggagggcttctaccttttgcttcttaagtttctgttatatttgaatatttacaactaacatcaactaaaatgatatttttaatgatcttgttgcatctgacaaaatgatgcttttttaacaacaaaaatctttccgtttttgcattaagtgacttgtctaaggttcttttttttgtgtgtgctttccatttcagattctcgatgaattcaaaaaggattcgtccgtgttcatcctggggtgaggcagctcttgtgtgtcgttyggggcggctgtgccggacctcggtgcctggtgcccagccggcctccaggaggggatgcctgtgtgtgcaggcgctgacctccaaaggggcagggggcccctgctggggaattggccatcccatgcctgtggcgtggatagagatgagcagtagcaacaggaaggtgtggagcactgggaggatggtccagaaagttctgtagaaaagcctgtgtgcctcagggcctcctttccccgaatgtgcctcatgagatgtgacaggttaatagtttttttttttaattacaaaaactaatgttaatgatcaaataagtgaaaaattccttgttaaacaggtttaactgaattaaaatsagttcaggtgtataaactgcttcacatgatgcttggcacccatgaggggctgatagatagtaatattattactaaaaagtcagagttgcaggacttatcaggacattcactgtgcctcatgatttcccaagtggggaatttctgagatgttatgtgtttccccagcctatctgactgggagaaatgttggccctggagttaatggtctggggtacgttgatccagtctttatcggtgagcaacttttccctctgtcacttttgaaatcagaaactccaagactccaaagtataaataaaatgaatctaatttttatatagtatgtatattcgrgacggagcctccctttgtcgcctaggctggagtgcactggcgcaatcttggctcactgcaacctccaccttccaggttcaagcgattctcctgcctcatcctccgaatagctgggactacaggcatccatcatgtccagctattgttttttttttttttgtatttttggtagagatggggtttcaccatgttggccagtctggtgttgaactcatgacctcaggtgatccacctgccttggcctcccgaagtgctgggattacaggcatgtgccactgtgcccagccataatttctatgtagtattttaatgaaaacttagtgttagactgtgaggctggtggggaaaggttagaattgtactcataatcaaagacaacagactcctggaccctgagtgtttagtaaagggagaaagctcagggcatgtttcatctcttacactatttgaaatagacctcttttccccaggctcctgcaagtgctcagggaaacatacccattaccctgggaagccccgtgtagcagaatgtactccccatccaacccgggggtggctcgtgctggcccagtgaggccctgtttttctggtggcctgctggccaaggcgggagtcctgcctttattcggagtgtagtgttccctagtgttccctacctgatacctaacctctgcttggtccagggaagtgtctttcacactgcagttaattttgccctgatggcctggagtctggtggggcctcatgtggctcccactccagagcactcaatgacccagggaactctggatcgtggcttctgaggaggcccttgggtctggctcctgtcctttctccaacaccagctctccctctacgggcgggtggtgtgtcgagccctgtctgggtattggrtaggcacactcacatccctgtgttccccacaccttttgctctgcaatccctccctctggcctgcgttccctcgctcctactcctctwtctttcctcccctcccttctcttttttcctcgaggccgctgcttctctggtttccttgccmggtactctctgcacctccttcttgctcaccccacctcattcttgctcaccccacctcattctggctcaccccacctcgttctggctcatcccacctcactctctggagctcaagtaggtgccttttcctcaggaaagcccctctggtcctccaggtctgggtttggggccttctcagccattcccactcttcccctcccttcccaccctcatctcttgctacactgtatcccatatgcctggttcacctgtcttccccatggccacactcctggaggggctcctcagactctggggtgcaccagagctattttggagcagctaaatgtagacaccagggcctgccccttgagattccgatgtcagggtccctctgaatccttgtaggtgagggacattgtgtcactcacctgtgtcttcctgttggccaacctggtacctaacacagtgccagactaagtggggcgttctgggtggcaggctgccccattggctggcatctcctctcgactcctctgttgaatgtgtctgtctctaactgcaccccctttccccgaggataggaacactgacaggccggatgcctctgctgtttacctgcatgacttccagaggtttctcatacatgaacagcaggtgagagcacaaggtgtgtgggtgcctgagggagctggcgggatgctgctggggactagtctcacccttctgccgcctgtgctcacctggtcacctgtgctcacctggccacctgtgctcacctggccacctgtcttcatggaacgattgcagtctgccagatgccagagacttcagattgctgtctgatgccactgaaactctggatgagaagagcctcatgtcgggcctcttttsaaggcacacattgaggatgagaagactgagaagatggcagggcaggaggggtgagggcctgaggatggggctgccctcacctggctgggtgcaccttttctggccatcatctcaggtgtcactgcctgggaagccttccttgactgatgggaggatgggatcagattcatcaagcctgccaggtcccctgggagataaactagcacagctttccttaaacaggtgatgcctgggacagtctccctggacagggtttgcctgtgggctctgagcccagctatagactcaagggggggttgtgttgcgccttggttttccactgctgtgacgatgcccccagaggacactgggcagtgtccagagacgacatgggtgcgtgtcacagcgggaggctgctgccggcatctagcaggtcaacaccagggatgttcctaaatatcctacattgcacagggcagccccccctaccccccagcgaagaagtattcagggccgggtagggtggctcacgcctataatcccagcactttgggaggccgaggcgggcggatcacttgaagccaggagttcgagacctacctggccaacatggtgaaaccccatctctactaaaaatacaaaaattaggcaggcattgtggtgggtgcctgtaatcccagctacctgggaggctgaggcaggagaatggcttgaacctgggaggtagaggttgcagtgagccgagattgcgccactggactgcagcctgggcaacagagcaagactccgtctcagaaaacaaaaaacaaaaacacccccaccccaccaaaaaaaaaaaagtcaaagaagtattcagcaccaagtacctacagtgctgaggacaagaaactctgtgagagtgagatcaacttgaaatcatcttaccagctgcacagccaccgacaggtggtttaccctttttgtgccccagtttccccctctttaagtgggattgagagcatctacctctgagaattgtggggatcagagtcaattgtatggatctgtgtgtgtgtgtgtgtgtacatgtatgcatgtcttttcacatataaatctcaaatttttgtttatatcattggagttccatttacttttttcttttacttcatttgtttttttttaaatagagtttatattttagagtagttttagggttgcagcaaaaataagttcatttacttaaaaaacctcttgtcttgcagaacatttcaaacatacacaaaagcagacagacggtttaatgaaccaccacgtatcatcactcagattaaaaattacgagcattttgcaattttttttttgtttgagataaggtctcactcacccccttgcccaggctggagagcagtggcatggtaacagctcactgcagcctcgacctcctgggctcaaccgatcctcctgcctcagcctcccgaatagctgggactacaggtatgtgccaccatgcctgacaattttttttttttttttgagatagagtcttgctctgtcaccaggctggagtacaatggctctgtcccatgttcaagtgattctcctgcctcagcctcccaagtagctgggattgcaggcrtctgccacaacacctgtatttttgtatttttaatagagtcggggtttcacaatgttggtcagcctggtcttgaactcctggcctcaggtgatccacccgycttggcctcccaaagtgctgggattacaggtgtgagmcaccacgcccagccccgactaatttttgtatctttagtagaaacaggatttccccatgttgctcaggctgatctccaactcctgggctcaagtgactcacctgtctcagctccccaaattgctgggattacagatgtgaggcactgtgcccsgcccactttgccagttttatttcatccacttmtaactttacactcctgtatctccctacccttcccctttcttcatttctttgctgaagaattctaaagcaaaccccagactttgcgtcattttgtttgtaaatacttctgtatgtttctctcacagatagaacttttttttttaaaatatagccataacactcctcttacagcttgtgcaattaacagtaatttttaaatgccatccgatacccagcctgcatttggatttcattgatggaagagaaacttatgagtagagaagacatgttttgcacaaggccatccacactgagggctcaggaaagggtcgtagctaccctagtaggctgataaatggtgaatgaggatgttgatgcgtgttgtaatcmtcatrccttcctagtgccggggttgaatgatgatgatcaaaagaaggcttatttgcccaacckgagactaagtttgagggaggaagtaaaatgaaggtaataagttaattttattgggcacagtcacgttaggtctgagctggtgctagagtgaggtagagagaaattcaygcacttttttcccttcattattttccttccactaaattattcagtttagtagggaacgattaaagttaaattggttaaattcttggggacaagtagcctcgcatcctagaattcaccacctggtagggagactggggcgtgtagatttaccccacctagtggtggttgactttattacgtgctttccccaaacggggccctttgctgggctgcccttagagatcagggatctggggccaggagaaagtgtaggaaatctctctctctgcatctggggagttaggacccgagcagccatgagcatccatgcgatgtttgttggtcacacagatgctcatatggaataatcactgcagcactttgtgtgcaaattagtatgccttttctagaaaacactttggctgtatgcaatgaaaagaaagctttacaactcgattctatatctggagtaaatagttgccctcccagacacttatcytaaggaaataatgrcagcatttttaataggaatgaaaacttggaagtaatctaaatttctttagaggattggttaagtacgccatagtacagctctgggatggatgggtgatgggataggaagggggttaaaagtatgtttctagaatcagtgtttctgggtttagtctgaggctcatgactgggaccacttacttaatgactagaagcctctcctctgtttccccatttatataacatggagaataacctgtacctcctggggtggtggtaagttcaagatgagacaccgtgtggggccgagtatagagtcagtgctcagtgttgatggccatcgccatttatttttattttcatccttattctttgccattttcactattacaggtatctagtgcaataccctacaccaagtkgatgcattttataacccctagaatattgacatttcagtcttctttaggtagaagatttctttctttgcagccagtccagggccaggttatattagctaagtacccatgccttttgataaatgcaaaaactttgtagggggaaggaaggagaatgcctccagcctctttgggacatcttggccaggcaaagttgttttttttttttttcttttgagatggagtctcgctctgtcacacaggctggagtacagtggcgcgatctctgctcaccgcaaactctgtctcctgggttcacgccattctcctgcctcagcctcccgagtasctgggactacaggcacccgccaccacgcccagctaattttttgtgtttttagtagagacggggtttcaccgtgttagccaggatggtctcgatctcctgacctcatgatccgcccacctcggcctcccaaagtgctaggattacaggcatgagccaccacgcccggcctagtattttaataaaatatcccacaatttgggtttcatgttctagtattcaaagattctgacacctctgtattcaaatgagcttgtagtttcccaccttcctagctgttttgggcccctgatccaggcatatttgcaagagtcaacagcagttcatttttgtcttgcacccatgcatgtcaccagcctsctggtcaccacctgatttgtgtctgttcttctatttttcattgtttcggacattgcatccagcccttcccatctaagcacacacacatctggtmgcatatttgcttctattagtcataaagataaagttgttagaatatttgaagtgaagaaagcattgatcaaagttgaatttacatgtcatatttcatccccttttcctatgaatatttgggatttcagggcatggagaggaaagcaacagttacttaatattatgcattctttttttaaagggtttctagaatgtctaggactgtgcagcagctgctttggaactggtcatgtatatttcagacgttatcagtgtttcagcagccctgtttgcctattcttttgaaaagagggcatatgattacattccatatcagtttcgttatttggagctgagactgcagtttacaagctgtgtgagcttaggatcatgaggtattgttcctgggcctctgtttccttttctgtaaaatgacaatggcaataaatgacttgcggagttgtgtggactaagtgagatgaccataggaggaagaaagatgcttgtttgcacaagctgccayggtcagagtactttctttttttttgagacagagtttcactctgttgtccaggctggagtgcaatggtacaacctcggttcattgcaacctccgcctcttgggttcaagcaattctcttgcctcagcctcctgagtagctgggattacaggcacctgccaccacgccaagctgatttaaagaaaraaaaaatktttgtattttagtagagatggggtttcaccatgttggccaggctggtctcaaactcctgagctcaggcagtccacccgcctcggcctaccaaagtgggtctgagcactttctgtgcaccaggtgctgcattaggcacataacctaataagattttatacaatgcttcatacagtgtacatttcatacaatgcttcacagaaactgtgtggtagatactcttattcccacttcatggatggggaggcacagagacggtatgtaacttgcccaaggtcaactaggtggaatgagatgccaacccaggtaagtgacctggaaggctgatgtaactactatgcccccaggctgcttcatactaacaaacgtaaagagctatcatagggcaggagctggcaaaccatgacctatggaccaaatatagctgaccacttgtttttataaacaaaatattgttggaatacaaccatgcccatttgcctacggatcatctgtggctgcttttgcaacacaacagcggagttgagtggttgcgacagacaccgtatggctcagagagcccaaaatatttacctctggctctctgcagagaacatttgctgacccctggcagagggccatgtgcagaatgaggcctcaacatgtggtggtcgattgcaagtgaattcggaattggttgatgtttcagtcttcgattgcgactggatggaccctgggaaatgaagaattttatcagttctcactttgctgatctctcgttctctttgtcattttaaggagcattgggctcaggatctgaacaaagtccgtgagcggatgacaaagttcattgatgacaccatgcgtgaaactgctgagcctttcttgtttgtggatgaggtgagtaggctgggcttgttgtcgcttgggggtgactttttgattgatgtctgtgctttctgaggtttattttctgtttgtctttccttggagaactttgctgtatgatgttgcctcgactgactggttagctgggattgtttcttttcttttcttttcttttttctcccaggttctagattactgtaactgtaactgcccagtgggttcattttgcctgctgcctagacagaaccgattgatcaaggcaggggaattgcaatagggaaagagcttaactcacttagagccagctgaatgggagactggagttttattattactcaaatcatcctccctttcagaggctggagtttcgtttttttatgtttttgtttgtttgcttgtgtgtttgtttttgagatggagtctcagtctgtcacccagcctggagtgcagtggtgggatctcacctcactgcaacctccgcctcccaggttcaagtgattctcgtgcctcagcctcccgagtagctgggattataggcgctgtccaccatgtctggctaattttttttgtatttttagtagacagggtttcactatgttggccaggctggtgtcgacttcctgacccttgtgatcagcccgcctcagcttcccaaagtactgggattataggtgtgagccaccgcacctggcggaggctagggtttttttttaaagattgtttggcgggccagggaaagggtgctgctgattggttggagatgcaatcatatggttgtggaaaatagtgtgcttctgggtggggccacaggaccagtgggcggtccaggtagagccatgcgaacgcccgaaaagacgtctcaaaaggccaatcttaggttaaaccacagtgatgttatctgtaggagtaactgaggaagttgctaatcttgtaacctccagaaaaatggctggtaaccagttagtctccaccttagcagaatccaggctcctctcatcctcctaacctggtcttaccttagctttacaaaggcagtttattttgggggaagggctggtatttaaactataaactaaatgttttccaaagttagcttggcccaagmccaggaataattaagggcagtttggaggttaaaggcaagatagaggttggttagatcagatctgtttcactgtcataattttyttgttgttctgattttggaaaggcagtttcatagccctttcttaytcttctctactgacygtgttgcctgggtgggattattgattttgccactagagggcatctgccaccagggagagttgaaccattgcaagcacagaaacagaatgcgaaggtgtctgggtgcttgctggtcagaatggttgcctttgaccttgcatagggaaggaggggaggtggaactggggagcgactgacccatatgaggtcgttctcacgcagcagaaattaggcccagatcgctaaagcatttttttttaaggggccaggaattgtaacttgaaatttcctgccctttcracattctgatatggataacactctgtttcttaagttgggtcgtgggttcacaaatattcatgctactattatgctttaaattgtatatatgaggccgggtgcagtggctcacgcctgtaatcccagcactttgggaggctgaggcgggtggatcgcttgaggttaggagtttgagaccagcctggccgacatggtaaaattctgtctctactaaaaatacaaaaattagcctggtgtggtggtgcacgcctgttatcctagctgcttgggaggttgaggcaggagaatcgcttcaacccaggaggtggaggttgcagtgagctgaaattgtgccactgcactccagcctgggcaacagagcatgactcagtgtgaaaaaacaaagaaagaaaaaccaacaacaatgtatatatggtaagcataaacccttgcagtagcaaatattttaggataaacattacaaaggaaaatattgtctaggtccatggaacaaatatgtcgctgcagcccattgcagcctgagccttcggtattgaaaacgtgggtaactgaggtctggagaccgcctgttgatttcccgcatcagagctgttcttccccyctggtgggcgcagaccagaaacaagcagacaccatcctgcccgtcaacgtgatgattcggtcttcgtgtttgactcttttagttcctcacgtacctgttttcacgagaaaacagcatctgggatgagaagtatgacgcggtggacatgcaggacatgaacaaccccctgtctcattactggatctcctcgtcacataacacgtgagtttcagatgagcctgtgatgggttgggcagcacagagcacgtgagggttgaggcaggggtccgatacgccgctccggtgagccctgttgtgaagcaggtggagggtgtagcaccgcattccttggactaaaatacacagaagcttctggaaggggctgggaacacacttccctttgtcagctggcattgtaataataatctcttttctgtggccctaaaaagctagtaaaaacaaargtaacttagtttatgtaacttagtaactaaagtaacatagtaaacttagtttttcacgatttgggcatctcacagtagccacagcaaagcaattcagtgactcattgaattgacttatagggagtgtgtaccctgtgcctgctgggagctggggatgtggctgtgaaccggcagcagccatgtcctcatgtgctgggaggaagacctccattgaaagttaaccacagaataggacttgctgatgtggggagcaggtggtaaggcaaggagaagtgtttcagacagaggagcagcatgtgccaaggccctggggcaggaacaactgagaggagtctgctaaggctggagtgcagaatccaggagagcggtgtcaggaggggaggaaggcaggtcctgctggagcaggatcttgtaggtcaccgtgagagctgtcggggagaccctgacgacttttaaccagaagatgagatgctcacagggggctcttgggatggttactctgattgcaacagaaggaggatacaggatgttgygctgatgttccagtatttagtctgtcttattgggtgaggggtgaagtccttgggtgatggcccccacagctgtgggtggggactttcctaagtgacattccagggggtcatctgggaaaaggctttttatggtgttatgctccaggcatttgggaaggtaaaatgtctttcagggggaaattgatttcacagttctctcttccccaccatgcccatcattttaagagtttgtgtttcagcatggtgaattctagaaaacctagaagacagttaagaaatacaaacttaaaaaaaaaacttttattttcagttcagaggtacatgtgcaggtttgttaaacgggtcaacttgtgtcatggaggtttgctgtgcagattattttgtcacccaggcattaagcctacttactacccattagttatttttcctgatcctgtccctcctaccaccctctgacagaacctagtgtgaggaacataaactttttttttttttttttgagacagagtctcactctgttgcccaggctggagtgcattggtgcgatctcagctcacaacctccgctttcccggttcaacagattctcctgcctcagcctcccgagtagctgggactccgggcacgagccaccatgcccagttttgttttgttttgttttgtttttgtatttttagtagagacagaatttcactatgttggccaggctggtcttgaacacctgacctcgtgatctgcccgcctcagcctgccaaagtgctgggattacaggcatgagccatcgtgcttggcctcggaacacaaattttcaaaaagttggggtgaatcatgacaaggaggaaagtgcattaaagagtcattcttacggcagttttggtggatatggctcctagcatagccgattgcaccaacagttgttgaatatctgttctgtgcctggcctcaagccttgatatcaaaagaagtgcccatctttgtttagaccgaggacccagagagcggccatggggccttgttaattcatcttctgcagctttttttgcttctgacgtgctttgaccaacttctcctcaaaagaacacgtcctctccacgcttgcattgcccaggtggtcagcagtcacttcctgcgattgtggcctgacttcagagctcatgcccagtgtgaccgtgggattgtgtatttctgtcctaggccttagctttgagtctttctacatggaagaactcagagctttggcggctcgsgcggagaagttcccccacaacaccctgaggtgcaggcttgccccccaacccctgtggctgccactctcacacggccacctgccttctctcctgcaggtaccttacaggtgaccagctgcggagcgagtcgtccccagaagcttacatccgctgcctgcgcatgggctgtcgctgcattgaacgtgagtagctccttcttggtggaggtcaggctcgcagcaaattgaggataaccatgtggttgctccatgttttctttcgaattgtaaaaaggttttaatggacacataataactgtgcatatttatggagttagagtgtgatgtttctttgttttcttttttctttctttttttttttttttttgagacggagtccctgtcatctgtatctcctcagcttcctcctgggctggtattagaggaaggcaaacagacacccgctgtgttttggcagctgggtcctaggtgtgcacaggtaccgcgtatcacctggattggggggtctgtgagcaaatgtgaaaagaatggtcagggctggatatggtggctcatgcctgtaatcccagcacttcgggaggctgaagtgggaggattgtatgaggccaagagtttgagaccagcctgggcgacatggtgagatcgtatcattacgaaaagtaaaaaaattagctgtgtgtagtggcatgcgcctgtggtcccaacaacttgggaggctgaggtgggaggatcgcttgagcccaggaggttgaggctgtggtgagctgtgattgtgccactgcactctagcctgggcaacagagcgagactctgtgtctaaactgaaaagaaaagaagggtcaggtggcatctctgcctgggcagatggcagacgccttatttccctccttccttctcatagcctctctggctattttccttccggcctctctctcaccaaaggctcatgggtgcatttggctgagaaaaggcaacaaccagcttgtcgtggtgtctcatgcctgtaatcccagcactgtgagaggtcgaggygggcggatcacttgagatcaggagcttgagatcagtctggccaacatggcgaaaccctttctctactaaaaatacagaaattagccaggcgtggtggtgcacatctgtaatcccagctgcttgggaggccgaggcacaggaatcacttgagcctgggaggcagaggttgcagtaagctgagatcgcgccgctgcacgccagcctgggcaacagagggagactttgtctcaaaaaaataaaaataaaaaataaataaataaaataaaaaaggcatcaactactgacttaggctccagtgttaccaaaacgactcatcatggaagcaacgttttgtagcagttactctatagactttcttcccgtttatgatttttctcctccctcaggaaaaaacaaatgtttaaaagtaaagcttgaagcagtcagctcctgtgccctccaggggtccaaaagattggggatgttcatcttccacatgacccatttctgtwtgaaaatattactgtgaacctttacaaataaatttctcattgctctgtatcatttccacgggcagaaaaggcagtcaaggttttcaacaggtaaagtcagaaaataaaacacgtggtaaaatcttctttaaaaagaagcattgaggttgggcgtggtggctcacgcctgtaatctcagcactttgggaagctgaggtggatggatcatgaggtcaggagattgagaccaccctggccaacatggtgcaaccctgtctctactaaaatacaaaaaaattagccgagcgtgatggtacgcgcctgtagtcccagttactcaggaggctgaggcaggggaattgcttcaacccgggaggcggagattgcaatgggccgagattgtgccactgcactccagcctgggcaacagagcgagactttgtcttaaaaaaaaaaaaaatgaaaaraaaagcagcattgaaactagcttgtcttggacagctgcacttgcattatgtaagcgcacagggaaccctgcggatacagggaaagccatgtcctcgtgttggcagccgaatggagggagtgtgggtgtccttgtctagtaactgaactggtgtgtgggccgggggctgacctcggggctgtcagtgaacacacgtggtattgaggctgccgcgtttctccctgtagtggactgctgggacgggcccgatgggaagccggtcatctaccatggctggacgcggactaccaagatcaagtttgacgacgtcgtgcaggccatcaaagaccacgcctttgttacctcgaggtcagttggctgatttctgggtggtgtgacttaaaggggaaggcagctagggttggatagacagatggacagacaggcaaacacacacagacacctccctccaaatgcgggaaggcctgggccccatcttggccaaagccactgccatcaagttctcacccgagtgttggcaccccctgcaggccgagagtgcaagttgctcccgggctctagagccccgaggaggctctggctggggaaccctgtggctgctcagtgcccaccccacctcctcattctgtctggcccccactttcagaacccccgaaagagagggaaaggctgggcgcagtggctcacgcctgtaatcccggcactttgggaggctgaggtgtgatcactgaggtcaggagttcgagaagagcctgggcaacatggtgaaaccccttctctaccaaaacacacacacacacacacacacacacacacacacacacacacacacaaatcatctgggtgtagtggcatgtgcctgtrgtcccagttacttgggaagctgaggtgrgaggattgcttgaacctggcaggcagaggttacagtgaggtcacattgcgccactgcactgcagcctgggcaacagagcgagaccctgtctcaaaggaaaaaaacccaaaaaaacaaaaaccaaaaaaaaagtgaggcaaggaaagtaaaattccccttctgtcctaattccctcttttgtgcccagttctcacccccaccaaacctgtttctacaggcggaatccaagcagccagtaatggtggtggtgtgttttttgaatacccacctggggccaggctctgtgctaggttctttgtacaggtgatcatattgattctttgccacaaagtgagtatggtcatccccatttaacagatgagtaaattgagacaaggaggggttaaatgggtgagaacatttaggttcatttcaagggtttctgacctcaggtgtaatcctyttctgtcccaccagaagatcttggtctgggctggaggtcaacgaaattgttctataaagagccagatacaaatgtttcaggctttatgggccctgtggtctctgttgcaactattcakccctgttgctgaagtgcaaagcagccatgggcaagaggtaaacacatgagtctggctgtgttccagttaaaacttgaattacacattacaaaaatagatggcaggccagatttggggcagaggccatcatatgccgactcctggtttgggttccttgttatttctgagagctggcaagaggccttctataggctcattggaatgatagttgtctttttatactttctggggtagaatagcagttacgagtatgggttctgagtccttctcgctgagtttgaatccagctgttgagtactagtttgggcaaagcacttaccatcctatgcttcaatttccatgttaaaaaatagaggtgataactgtgtgcacctcacagggcggttgtgatgattaaatgagatgccattacagcaagtgcttaaccctgcacctggcatagagtaactgttgagtcaataagatcgattattttttytctttttttcttttcttttcttttctttttttttttttttgagatggagtctccctctgtcgcccaggctagagtgcaatggcaggatctcggctcactgcaacctccacctcctgagttcgagcaattcccctgtctcagcctcccgagtagctgggattataggcatccaccatcatgcccggctaatttgtgtattttggtagagatagggtttcactatgttggccaggytggtcttgaactcatgacctcaggtgatcctcccgcctcarcctcccaaagtgtggggattatgggcatgagccaccgtgcccaacccgattggttatttttattgcatttactgcagatgtcccttgagctgggtggaggtgttgctgtgagacaatgaaattatggacgtcttttcgcacttggtgaaaacctttcaatgaaggcatatgatttctccatcgcagcattctcccctgtggggtcctagcccttctaagtgccaacctccatcaggcagatggaaggagctggtattaacagacactgtgcagtggcagcttacactctgctttgagagtttgctttcatttgcaggacataggtgcttatggttgtgagctgacagtcattcatcgaacattatctcattcatgactagaggaagttttttctggttaaaatagggctggaatcatctaacacctatagggctagaactctgtaatcaaacattaatgcattaatgttttggcagcaaaagccatccttattggtattaagagggatttaagaaaatgattgcaagcagcgttcattcgaatggttcagattttgctctcagttacattttgataccaacttactaggtagcctttgttgtaaaagctttttagctgttatgttctagtaagggtgtgtggatcaggatcggggagtgagctgggtccacgcttcccaggagtgatgaggctatgatttacttgagctggaacatggttaaggattttatttttatcatcgtcactttattttcacatttrccttcatttctattgagtgaygtgatttcctatttatggaagtgacatagctgcctttagaataattttgtttcatagtaaatgccatgcacaagcctcagatggattcttggtgggaaaaactccatctatacagtatatttcttggataactggggaaatttgagtatgtctaatgatcagtatgtctaatgatcattatttaaagatagtttcctgaggtgatatggtgtggtgatgtcaggggatgttcttaagagatacctgtgggggatgtctgcgccttatttcagatggttcaggaggaaacgtaaatatgtgtataaatgaaatacaaatataggctgggcacagtggctcacgcctgtaatcccagcactttcggaggctgaggcgggtggatcaactgaattcaggagtttgagaccagcagcctggccaacatggtgaaaccctatctttagtaaaaatacaaaaaattaactgggcatgctggcagatacctgtaatctcagctactcaggaggctgaggcaggagaattgcttgaacttgggaggcggaggttgcaatgagctgaggtcacgccattgcactccatcccgggcaatgagtgaaactccatttccaaaagaaaaataaataaataaaataaaataaataaatacataaataaatgacttttctcctgcctcaggaggagtatgtgtgtatatatatatatatatatacacacacacacacataaatatatatgtgtgtatatatacgtatatatgtatatacatgtactaatgatatgtgaatttatacatacacgttcacatgatatagaaggatacaggtgatccttattggtggattctacttgctaaaattgacttgtaaccccaaatcaaatctcaaagcactctgaggtcattctgagacacgcacaaagtgtgggaaatgagactcatgcgatgcacacgtgttcagctgagggtgagcaaagcagcgctccccttcctggtctacagcrtgaaagcttcaacaagtgtcctcaccrtctgttgactgccaygtttttcctgtttttgagctttttcttggtgatcttgctgttcaaatggcccgaagcacagtggtgagggctgcctggtgttcctgagcaggagaaggctgtgatgtgcccgatggagaaaacacctgtgtcagatacgcttggttcaggcacgaattacagtgatgctggctgtgagcccagtgtcagtcaataatatataccaaatcaggtgtctttaaacagaaacacacataaaacaacgtcagatattgattcaytgaggaaaatgttgtgaccacacgctcaaaaggccctgatcctgtatttccccttaggagcaatggctcaggtatttgccaatcagtgttggtggtgactttatgaaccataaccccaatagataagaaaaatcaactacagatacacacaaatgatctataaatacacagacaccttatagaaatatacatatatacacatacaaataataaatgtatgcatgcayacatatgcaaattacatatgtgtgcatatgaatgagaatatataaaaccaatatactttataaatagaggaagtaataaacatactaaagtaggtggatgcacacgtggaacagcgtccctgttggtgaccctgggtgaagcacacatgggtgcttattgtgctgtctgttcatcttttctgtaggtttgaacttgaaaaaaagattagagacttttttctgtaagtttaaagatatgaatagatggaaaaaaatacagagaaaaggtgcattctggggtatggggaagctcctgaatcagatcgcagctgttctgagtcccaagacttgtgccytcacacccaggatgaggtcctctccttctgggagggcagatgtgggggttgtgccccccgagcagcgcccggtttctgtcgtcccagggagctgccctggcccctctgtggggcagatgcagaggtgtgtgctccccctgccgagctgcccaccctcttctgcctgcagcttcccagtgatcctgtccatcgaggagcactgcagcgtggagcaacagcgtcacatggccaaggccttcaaggaagtatttggcgacctgctgttgacgaagcccacggaggccagtgctgaccagctgccctcgcccagccagctgcgggagaagatcatcatcaaggtaggcaccccgggtgctgctgttggctgtccagggagcccagtggctcggttccccggctctgggtcccgttcaccaagttctatgtcctactgggcctgctccaggtcccactgcacaggctcaaatctgctctccttactaacactgtgaccttaggcaaagtcattaacctttgggagcctctgttgtcaccagtctctgggggagataatactggaacycatctggctagcttgctgggagcatgatgtgagggaaggcgtgcagaatgcgtgcaactgcgcctgtcatgtggttggtgctacgttaagtgctaacctgttatagttcatttgttcattggtgaaccttccccatcctctctcggagacagccccatgcgaggtgctggaggtgtccagcgacctgggtgctgttcctgtgattgcagcttccagttgtgtgggaggcgggcagttgctagaaaaggctgagtgcagcaatagagctgatgttcccagcactgcaggggagatgggtgattatatctgtgcctagggatgccatggtaacatttggatttttgaattattaggataaagagaccatatatgccgtggcttaaagcacagaagagtttatttcttccccatgcgagggagaatgttctgtgagttttgagctctagcccacaaggtgactcagggacccggggcccccgcattctgctctagcatctctcagggcagcagttttcaactggggtttcacagacccccgaagaatccacggttagaatcagaggggcacgtgaacttcaacagaaaaaaaattacatctttatttgtttaacctgtacataaaacttaatacttccttccattgtgaacattggcagcaagccacttgcgggctctgtcaccagcagaagtcatgagtgttttcatatcccgtttacagttattgcaaatatttcaaaataatgttgtgctcgtcatcactttggaattatggaggttattaggtctgcctctagatcttatttaagatgttaatgaagaaacccatctwttagtgtattgcaaatatttatttaatatcttaatcatgtttcaatataattgagtttcctttgtaattttatgcattattattctgagaaaagggtctgtagctttccccagattttgaaggagctcattacacaaaaacggtgaagggactttgctttgtccttgtttatgtggtggacgcttggtctcaggcacatccgagttccagctcagagcacgggaagtscaagggtgtccagggcaaatggtttctggtaagcaagtcagctgtcccgtccttttctctactgttctgtgcatgagagcttagtcacgttacctgcaaggactgtggaatctgaagtccctagcggggcagcctttcatggaaggagcgagtgtgaattttgttgacattccacragctcatggggaaggacaaacagctgtttcctaggtatttcagtctgttcctgcagctatcacaaaataccctaagctgggtgggttataaacaacaggaactgatttctcacggttctggaggctggaarttcaaggtcagggtgctggtatgagagtcctcttccaagttgtaggctgccgacttctagttatgtcctcacatggtggaaagggtgaggcagctctctgggacctcttttatttttaaatatttatttatttataaataaccatctgggacatggagatatctttggcctcttttataagggcaccattcccattgatgagagctctaccctcattcccattcackggagctctactctcattcccacttatgagagctctaccctcattcccattcataaaagctctaccctcattcccgttcatgaggactctaccctcatgacctaatcaccttctgtgttacccattctcacactgctcataaagacatacccaagactgggtaatttataaaggaaagaggtttaatggactcacagttccatatggctggggaggcctcacaatcatgtcagaaggcaaaggaggagcaaagtcacatcttacatggtggcaggcaagagagcttgttcagggaaactcccatttataaaaccagatctcatgagatgtgttcactatcacaagaacagcacgtgaaaggcccgcccccatgattcaattacctcccactgggttcctcctatgacacgtgggaattataggagctgcaattcaaggtgagatttgggtggggacacagccaaaccatattaccttccaaagctaccatctccaaataccattacattggggattaggtttcaacatataaattttgggaggacacagacattcagaccatagcagtaggcagagaarggggatgtccttccaggttgggacaataggacacacaagggtgtggtggtgtcaacacgtggcatgtaccctatattatcactgggccaccaagatacattggacacaatccttatgttccaggaagtcgtggtttggtagggagacaaacccgtcaacagagaaacaccaaacagtgcaaggagctttggccaagcrcaaccagaggaggggatgttggtgcccccatgggtaagagcatcagtgcacggggagtgtttggccaagactgtgacccttaaggtacagatgtttgcctaagcgggagatcagctgtcattgtcttagtcttgcagatgagaagtgtgaggcctggagaagtgcagccacctggctggggtcacaagttaacaaaatagctgcagcactgtttgcacccaggcagttgtttcggagatgccaagggatgcttccagcacggtgaaggcaggataaggggtggagggagctcggccatggagggtccatggcttctcaggcacctagttggtgagtcttcggggcagcctggttgcatgtgctcttccctgttcccagctcattccttctgtttccattaggatggcttgctgcctgttcccagggagttttcagctcttgttctaagatgcaaagtactgaaggccccttttagagcacmctctgccccacacctgatacgctgtggcccacttctttctatttcaagaaatgaggtggaaatagcgttggccacacggtcactttgtaccatgcactkggctaggcrtggtcataygtatcttcttattcagtcttgtcaagacactgcaggacgaataacctcagcccttgcccactttacagatgtggacattgagattcagaggttaaatagctcagccagggtcacacatttagtatttgctgaggaaattrttcaaggccaaggtggtctgccctcagagcctgttttcccatgcctgtatcatgctgccattcacaagggacactgaggtcctgcttcactgttgacacttatctttcacgttctttgacttacgggatcccacaggggctgccacgtcccgattttacgagacagattactgagactctgatgatgactcagccaaggtcacatggccagtaaggtaataggccctgaattcaaatctggatctgacycccyatcctgagctccttcaccaggttacatgaccctcaacttacagacgcttgcctgcgtgggagtccaggtgtcatcactgtcttaatcttgcagatgagaagcctgaggctcagagaagtgcagccacttgcccggggtcacacagctggtagaayagctgcagtgctgtttgcaccccggtcgccttagtctaatccccattgggtcccccgccaccctgcccagcctgttccctctggactgcggcctgcctttccctctgtgtgctagagaaggctgggcacaggtggtgttgttgtttattcaccgagtatcaacagagcacttactgtctgctaagtgctcttctagcacaggagactcaacaggaagcaaaacaacatccctgccctcatggggyttatattctagcagtgaggacagaagacaaacacatggtgtgtgtagggctagacaagtgagaggaataaagcaggcttggggctagagagtggcaggataggaaggggagtgtgggctatttttacttatttattttttactgggacagagtctcactctgttgcccaggctggagtgcagtggtgcagtctcagctcactgcaacctccacttcccaggttcaagcaatcttactgtctcagcctcctgagtagctgggattacaggcgcgtgccaccatgcccggctaatttttttatttttgtagttacagggttttgccatgttggccaggctggtctagaactccttagctcaagtgatctgtctgcttcagcctcccaaagtgctgggcttataggtgtgagccactgcgcccggccagtatgggcaatttttagatgaagctgtaaggaaagctcctcctcctcgttcagggtaacctggagggcagagctgaacagactaagagggaagccaggcagcaagaacaggcagtgcaaaggccctgcctgggaagaggcagatgaaggctgctggctcaaaggcctaaacttgggtctccatggagacagcctatgtatatgttttcccctcagcataagaagctgggcccccsaggcgatgtggatgtcaacatggaggacaagaaggacgaacacaagcaacagggggagctgtacatgtgggattccattgaccaggtgggccttggtcccttcccgtagccactgcggccacsccccttgcagctgcttcttggagccctgctgggagctctgagaatacgcctgtcttgttcccatttttagtcaagtgagtttttgcyatgtgaatttaccttccttcttaaactttatttatttatgttgtgggacagggtctcactctgtcgcccaggctggagtgtagtggtgtgattgcggctcactgcagccttgacctcccaggctcaagtgatcctcccacctcaacctccctgagtctctgggaccgcaygtgcgcaccaccatgcctggctaattttttgtatttttgcagagatgggatttagtggcgttgcctagggtgatttcaaactcctgggctcaaacagtcctcccaccttggcctctcaaagtgctgagattataggcgtaagcttctaagcctggccaactttattttccttttgcatttttaatgttttattttgaaataattttagattaaatatatttacacacacaaatagtatgggatattcccatctacccttaccaagcttctccaaatattattaacatcctacataaccatagtataattagcgcaatcaggaaattaacattggtacaatactaataactagtttatagatggtatttcattgttgccactgtgttcactcaggctattttcctgtttcaggatccagtacccggtgctgccgtgcatttaggttgtcctgactccttcgtgtcctccaactgggggtcgttccaccagaaaccttatttttcagactttaatgctgcctctatccctttacctaatgtgtatatccattttgagtatatttttacatgtccgttcttatatcctagatacaacatacatatcaaaggcaatatttatttattacttatttatttattttagatagtcttgctccattgccctggctggagtgtggtggtacgatcttagctcaccacagactccacctcccggttgaagtgattcttgtgcctcatcttcccaagtaactgggaccacagatgtgcaccaccatgccctgctaatttttgtagccttagtagagatagtgtttcgccatgttggccaggctggtcttgaactcctgatctcaagtggtctgcccgccttggcctcccgaagtgctaggattactggcgtgggccactgtacccagccaaaaatggcaatatttaagtaaagaattaagttgggccaggcgcgatggctcatgcctataatcctagcaccttgggaggcygaggaaggcagattacgaggtcaggagatcgagaccatcctggctaacatggcgaatccccgtctctattaaaactacaaaaataagttgggcatggtggcacgtgcctgtagtcccagctactcaggaggctgaggcaggagaattacttgaacccgggaggcggaggtttcagtgagctgagattgagccactgcactccagcctggtgasagagacagactctgtctcaaaaaaaaaaaaaaaaaaacagtgcagcacaccaacatggcacatgtatacatatgtaagaaacctgcacggtgtacacatgtaccctagaacttaaagtataataaaaaaatacaaataaaaacgttattaaaaaaaagagtttctgcataccctgcacccagcctcctctcacattaacgtcatgcatgacaataaaacagtgaccaaagctaagaacttaacactggtactttacaataaaaccagagactaaatttcatcggggraaaaaaaaaagaagtcattaagccacaaataaatattgaacgtaaggtctccagacaaactggctgggaaatcctgaaagttttaaaaggtagatggaatagaaaagaaaatgatgaggagttgtacctaccttagactcatggatctaaaaagtccaaaaagaagctcaaataccaaaagaagctcaaaatgcatcgatattttaaaaaagaaatgccttgtaaggaattgaattcagagaattcgccataaatgtctatgaaactgggaaaagcacatccatagtagatgctggggtgacgccctgcagggctcctgggctccacagttgatgaggtagaggacttggggggcactaataccagtttcactttctagaaatggactcggcactactgcgccattgcygatgccaagctgtccttcagtgatgacattgaacagactatggaggaggaagtgccccaggtagggggacaccctagccacatagggaggaggtccccaggaaccccgaggaccagccagtcccygggacctccttcccatgtggcttctctggccggctggcaaggggatgctccgctgaagaagctgttgatactctgggtaccatgtcctggctggcttgtctctgattggctggctgccccaggtgctttaaccagtgaggttcaagatgctttcctgctctctaaagtgcctgattggccttagatggaggccggtgctctggcttggtcccatgctttcctgttgccctctcctccagctgtggtcatctttcccgctgtttatttctgcagcccccagggcctcatggctctcagacttcccatagaacagaatggagggctttgctgggaaccgttcactgcatgtctcaggatgccaggaggccaccataaatgagggctctcaggagtgggaggcaggcagaggagggtagcaggtgctgttttcccataccccttcgggtggggaccagctgaggctggcctctctatgttatctggtaccctgggtcagggtgagacagaaggacctgtctagtgatgctggggtttggtccaaggctttcagaaacccctcctctctttgcggcccaggatataccccctacagaactacattttggggagaaatggttccacaagaaggtggagaagaggacgagtgccgagaagttgctgcaggaatactgcatggagacggggggcaaggatggcaccttcctggttcgggagagcgagaccttccccaatgactacaccctgtccttctggtaatgcccccgacccagggaacgcctaccttcttctccatgccaaccgatgaggcagggtggcgagtggttctagctcaggcaggaattgggcaggctgggacctgaatcccaggcttcatttgtctagctcttctaggccgggacaagggtgaggtgggtatgactcacttcggcactgtaacccagattaatgagatttcagggcaatcttttaaaaaatcaaaagtaatgcaaaaaagtctgtgatgaacaaaatatgaacattttaaacaaagacaagatctgaccctactcttagatgatgtggtctcactcactttccccgatcccagccctggagtgggtcatgtggctctggatgattcagccaaccttctagcatctctgtctcctccataaaacgaggactctagggctgtccttttgaagccgtcataggctgtgatgagcttgtgcattcattcatccacccacttatccatgtctcagtgcattmaaagatacttcttgagggcgtgccctgtgctagacacagtacttatgccagacagacaatgtctttgtcctcctggacactagcgtcttttgaaggagatgggcaatgaaaaagcagtcactcaaatgatttgcaagtatagttgtgatgagtgcaatgaaacaaggcaacataaagggacatccctccctttattgggggggtttaatgtgagttggggggatttgtgaaagtctgtgaggaaggctctgatgccctgacgtggggaatggttaggaaaaccttcctgaaagaagatgagacctgaaagagggaaattataattctgtcacttaaaaaaaaattgtgatagggtcttgctctgttgcctaggctgtagtacaatggagcagtctcagtcactgcagcctcaaactcctgggctcaagcaaccctcctatctcagccatttaagtagctgggactacaggcacatgccacgacacctgaataacttttaaattttttgtagagctggagtctcactacgttgcccaggctggttttgaactcagctcaagcaatcctctggcttcggcctcctgaagtgctaggattacagctgtaagccattgcacctggctgaaaattagaatactaataacacgcaaataatcctggacacctaaatgatgcttaccatgtgctgggcagtattygagacaccttgtgtgtgtggtctcgtttactcttcaggatgcctctttgaggtggatactgttatcattcctgtcagaccgctggggtagtaatacagtgtggctcagacagcacgggtgacctgctccaggacacttggttcatatgtggcagagctgggatttgaatccaggcatcctggctctagagaagcagttatatatataaaagggggatggggtggggtggggggggggaagtaggtagaatgttctggaatccaggctgagggtctagcctatactaaggccctgcatctggttttgttgttgttgttgttgagatggagtctcgctctgtcgcccaggctggagtgcagtggcgtgatctcggctcactgcaaccttcgtctcccaggtacaagtgattctcttgcctcagcctcccaagtagctgggattacaggcatgcaccaccatgcccagctaatttttgtatttttagtagagacgagatttcactgtattggccaggctggtctggaactcctaatctcaggtgatccacccgtctcggcctcccaaagtgctgggattacaggcatgagccactgcgcccagcctcctgtgtctgttctaggagcagagggaaggttgtgtggccacatgtaatgtccccgcctctgaggccctggctgccgcaatggcctggcctgcgttctcccagcactgatggcgtcctctccccgcaggcggtcaggccgggtccagcactgccggatccgctccaccatggagggcgggaccctgaaatactacttgactgacaacctcaccttcagcagcatctatgccctcatccagcactaccgcgagacgcacctgcgctgcgccgagttcgagctgcggctcacggaccctgtgcccaaccccaacccccacgagtccaagccgtacgtgtctgagggtggagcargaggcaggcggtggtcgggttagctccaccaggcagagaagctggcctggtggttcagccgggccagtcccccaggacaccctctccccagcccaccggcatctcaaaattgccgaggtggccagtttccaaattcctggcaccatgacctgtgtccttttctcttttctttctttcctccccttttctcttttccctttcttctactttgtcttcatagccccgagactttgggctttgattttcagagggtcattttggcctggggatattctcttacctttcagagctccttcctgtttgttctgaaaatgaacaaggaaacaatgattataagagtctcccgctgattttttttatctagtgaaatgagtatcaaggtaggtcttgcgaagggtcaacaaattctgggaataaagaaaaaacaatttttaggcagaaagctgcaaaaatgtacatttccgaggaggccgtattacttatagcaactttttttttcactttttctgtcacattttcctatggattgcctcttaaaacttgctatttcttatcttaagaaataacccgaaaacaacccaaaaccttgtgaaactcctgctgtgatctccgtcttcgattttctgagacacgtggcaataactgtgcctccctgggagcctggcttttcaggtttgggctgcttgggtggatgaagatgaatcaattttttgagacaaggtgttgctctgttgcccaggctggagtgcagtggaacaatcacgtctcgcagcagcctcgagctcctgggctcaagtgatcctcccacctcagcctcctatctgggactgcaggtgtgtgccactgtgcccagctaattaattaattaattaattaattttgagaccgggtctcgctctgtctcccaggctggagtgcaatggcacgatctcagctcactgcaacctctgcctcccaggttcaagagattcttgtgcctcagcctcctgagtagctggtattataggcgcacgccactgggcctggctaatttttgtatttcctttttttttttttttttttttttttgggacagagtcacattctgttgcctaggctagagtgcagtggcatgatctcggctcactgcaacctttgcctcctgggttcaagtgattctcctgcctcagcctcctgagtagctgggactacaggcgcctgccaccatgcctggctaattttttgtatttttagtagagacagggtttcaccgtgttagccaggatgatctcgatctcctgacctcatgatccacccgcctcaacctcccaaagtgctgggattacaggcgtgagccaccacgcctggcccaatttttgtatttttagtagagacagagtttcgccatgttggtcaggctggtcttgaactcctggcttctcgcgatccacctgccttggcctcccaaagtgctgggattacaggcgtgagccactgtgcccaggctattttattttttatagagatgggggtctcattgtgttggccaggctggtctcaaactcctgaccccaagtgatcctcctgcctcagcctcccaaagtgctgggatttcaggtgtgaaccactgtgctyggcccaatgtattattttgggcttgaaacagacccctggggtcttccactattcttttcacaaattctctttgctgaggtgcctttgtctggggaagcccactgtgtgatttccatggtcgtttccagggccaggttccaggtgtcactggtgccattatcttgtcctctgcgggtggcccactgacagcctggagaccgctcacctggtcgttttccctggccctgtgccgcaggtggtactatgacagcctgagccgcggagaggcagaggacatgctgatgaggattccccgggacggggccttcctgatccggaagcgagaggggagcgactcctatgccatcaccttcaggtgggtgcgagggtgggaggcacatgctctacagaggggcttggcaaggacagatgcggagagacaagggggaacttcaggtggaggctcacctgcagtgcyctgcccccccagcatcagcgacaacaacaaccaccacagcaaaagcckctgcgagaatgtgcgctcctgcgtgccaggcacagtctgcgttctccagggcaggatgttctgtagtaactcactttggcttccagtaactctgtggggttgacatgaccatgatccgtgtttctcagaggaggaaactgaggcacagcaagattaagtaacttgctgaagcatgcagccactaagtggtggggctgggattcgagcccagacagcccaggcagcccaggcctgtgatgatayagatctggtttcctcccaactgcagctgcwgcccaaccacctctaggcctgtggttctctaatgttaccccaaaacgccagattctcccacttccactaatgacaaggagccgaggagtgactcagactccgtgtagcctactgtccctccatctccccagccccagggtttccctgcatgttcttacggtggtaacagtctgctatatgttgagttcctaaccgtgttctagacactggactgccttcaaggcctcatctgattgaatcctttgctacagcctgtgagaggtaggtctagttattgcaagggaggaaacaggaccagagaggttaagtgacctgcctggagtcacacagcctcatagtcaactgagtttgaggttcagatgcaggcctgtccgtctccaaagcctaagctcttcactccagagtctctagmcagaggcctgggggccaaatctccagccagaggcctgtgggcgtcttttgtacactgatgtgaaaaactgagaaatttcactgaaaaactcagattgcttcttgtgaaaaatgggaggcagtggatgctctgggcctgtgtttccacatgggcgcggtggtgctggctgcatggcagctactgtggggtgtgtggtttgcccctgtccactcctctccccattccctctgccctgatcccatcccctggtgaccctgccaggctgccccctgggcgtttggatttcccttcctccttgcctgcaccactatgcctgagccacctccctggggaccgtggtgacggtcattatcactatagtttactgaggacctactgtgtactggctccagccagagagcagcctcccaccagcatggcttttctgtactctctgttcccaagagggtgacctgggcttctcagcattggtgcctctgccctttgctctttcccctaagcctcttagtggtacctcctcagcctggatggggaggaggtgtgttcagtccgctgcacacggattgaaaacctgctgtgtgccaggccccaggtggggtgttggcactcccactgtgctgtcatcctgtgcaaatgatggcaactaaacccaactggctgaaactgaggtgcccaagcggtgagacagctctgacacaaccggatcggggcctcacctgatgatggtcaggatgccacctgtatgtgcatgctggcgttactctccatcagcttctgtctcaggtggctgtaccttgggctgccaggacagtgtccggcagaaaggatggccccctccctgagccaggtggcatgattctgacaggccatctggggatggggttggggtcacttcaatgggaccgcgtgaatgaagaggttgggtgggtcctcaggttgattgcctgacttacatacacgccccattcagtttgtgagcctgtcttccccatgagattggaggtgtcttgagaatggaagtttttattttttagaagttaatagatgtttggtgagcacctactgtgtgccgggccctgtgctgggctccagagatgcaggagtgataaaaacagcccagtccttgctctctcaggctaatggtctggcagggatgagagacatcgccttactccaagtgtttcttgcttttgacctgttcctgcttatgtaacattggctgggatgtagttggtggttggtgaatgctggctcagtgaatcaatcagcaaggatggccgctccccacctcaccccatggcccactgtcagggaagctcagtccacacagtgtttctcaaagagttggggtgtgaggactgatcctgttgtatttggatgttgaacttccctggtctctacccactgcatgtctgtctgggaccctaagtcattgtaacaatcaaaaataacatccctgccccaggacacacactttttcaaaccctstctggtcagggtatggggtgaagcgtcactgtccttcactgagaagcactgaggaggtttgagcacataaggaaatcagtgtagtattttgtgatgagtgctacaaagggattggtcaggcagggtggtggagggtgagtagctctccagggaaacggatggggaatttggaccaggcagtaggggaacacaggtctgcagcaacttctccttgccctctacatatttgtaaagtgcctctcctgtgccaggcactgttctgggctctggggatgtgtaatgaacttctggatagatttccccagtagaggagaaacacctgctttcaaatccacaaaggaagtgttgagttgttgcccggctgtgattggtggaaggcatctcttgggcagtgaagctgagacctcaggctgtggccgtggcatccacgctccaggaggatggaagatgcaactcgtattccagacctgttcccatctccccttctgattctcttttctcccagggaagttagttgtgggttgatttcatttatgttttccaaaccattcacttactgagtcctgcctgagtgccagacactgtgccgacagcttaccctgaataagctartagacgatgatcctaatgctccccatgcracgggttgtggatccccgatgctgtggatcgggaagctgaggcttaggggtcccctgtggaaggagccggaacctgaccttggctctgtacctcggcaccccagagcccccctgcctgccctgaggagctcttataaaaagttttaaaattaatttttaattacatgaatattgcaggaggatattctctctataaaaaattaagacattacagtgaaggctaaagccccctgtggtccttctaatctcagtagagaggtcctggtagaaagcacagttttctagctggtgtgtccatccagacatttaaaaaatatgtacatatttatacatgtctgtatctatggaaaatatatggtgccattttgtgtctgggtattttcattctatttttagaaaatacaaatgggawcattctgcagcttttctactcagcagtgtttcttttctttcctctgtttttttagaaggaataaatatttaataaaatatcactggaaataaaccactgaagcagaagtcttctagcattttgtttttacaggactttttgacgaaatcgcttaaagcaatatattttttttttcaaaagactggaaatccttttttaaaaaaagaaaaaaaacaacgttttttaaaaaaagaaaaaaataaatattttaaaacaaaaagtctctctatagtgcaaaaaatgccttttcttgatttttttccctgccatgcaaaattgttaaatgagcagtatgcccatagaaacgatgcctctagatgcttttcctaatttatttaattgacaaataaaagttgtttatatgtatcatgtacaacatggtgttttgaaatatgtatacatggtgaaatggctaaattgagataataacatatacacacacttaaccattttttttttgtgtgtggtgagacttaaagtctaccctcagcaattttcaagaatacaggacatattttttttttgaaatggagtcttgctctgttgcccagtctggagtgcaggggcgtgatcttggctcactgcaacctgcacctcctgggttcaagggagtctcctgcctcaggctcctgagtagctgggattacaggcatgcaccaccatgcctggctaagttttgtatttttggtaaaggtggggtttcaccatgttggccaggctggtatcgaactgctgacctctggtgatccaccctccttggcctcccaaagtgctgggattacaggtgtgagccaccacgcccggccaggactttgttattgactatagtccctatgctgtaccatagatctcttgcacttactcctcttgtctaactgaaattttgtatcctttgaccaacatatccccaacactccctacctccccctgccccggaccctggtaaccaccattctactytccacttccgtgagtttaaacctttttaggtttcacgtatgagatcctgtggtatttgtttttctgtgcctggtttatttcacacagcacaatgtcctccaggttcatccatgctgttgcaaatgacaggctttccttttttttttttttttaaagcaaatggtattccattatgtaaatgtaccacattttctttatccatttatctgttgatgggcaggctgattctacaccttggctatggtgaatggtgctatgaacatgggagtgcagctttctctttgacatattgatttcctttccttcagatatataccgagaagtgggattgctagatcccatggtgttctatttttaattttttgaggaacctctgtactgttttccatagtggctatgctaatttacagtcccacccaccaggtgcaggggtccccttttctccacatccccaccagcacttctcctttagctaatagccattctaacaggtgtgaggtgacatctcatagtggttttaatttgcatttatctgatgattagtgatgctgaacattttttacgtaactgttggccatttatgtatcttcctttgagaaatgtctattcagatcctttgtccattttttaaaattttttattttttgagatggagtcttgctctgttgcccaggctggagtgcagtggtgtgatctcagctcactgcaagctccgcctcctgggttcacgccattctcttgcctcagcctcccgagtagctgggactacaggcgcccgccactgcgcccagctaattttttgtatttttagtagagacggggtttcaccatgttggccaggctggtatcgaactcctgacctcaagtgatctgcctgccttggcctcccaaagtgctggaattacaggtgtgagccaccacgcccggcctttgtccatttttaaattgggtcatttattttcttactattgagctgtttgacttccttatatattttggatattgaccccttaccagatgttcagtttgcagatgtttttcccattctgtaggttgtttatttactctgttgattctttccttggctatgtagaagcctcttagtttgataaaatcccatttatccactttcacttttgttgcctgtgcttttggggtcatatctgaaaaataattgcccagaccaatgctacggaggttttcctctctgttttcttctagtagttttacagtttcaggtcttatgtttaagtctttaatccattttgagctgctttttttgtttatggtgtgagataatggtctagttttcttctttcgaaattgctattatttctatataggaatttatttcaaaattcttttaatttttttaaatctaggtttcccaaccctacttatttaacagactgtcctttccccctggtgtgttctagacatctttattgaagatcagttgactgtaaatgcatggatttatttcttggctatctattctgttccactggtctgtgtgtctgtttttatgccactgttgtgctatttttattactatagctttgtagtatattttgaagtaagatagtgtgctatctscagctttgttatttttgctcaaaattgctttggctatttggggtagacatttttaaaaagaccctcttggctgtaaacttagggtcaaaaatatttttccagatgtttctgtcttgctgataaaagctaataaaaccaaggaggctcttctgttttggattttttctgcttcatgtttcaaacagatgaaggaatgaaagacttgtttcttttttttttwaaaaaaagtcactgttttgctagttgagtcaccgaagacaagatttaataattttgaggtgggggggattggcaaacattttctgtgaaggaccacagagtgaatattttaggttttgcaggccatatggtctctgttgcagctacacaactctgctgttacagtgtgaaaacagtcccagacaatgtataaacaaatgaactgtagctgtgtttcaataaagctttatttataaaagcaggtggtgggacacatttggcstactcttgacctagttccctaggaagctcctaaagtcaagtcctgtagytggggaggagaggaagggtaagaggagctgttgagtcactcggccatatttcttctgagasacagattcttctagatctgttttgaaaatacccacatcattgttttcttattgtcttgtattccataggaggactataccctgtttatttacccacttctctaaggctggataactaggttgtatctaatcagtagggtttgtgtaaaaattgtttggccaccaggatcttggcatgtcaaccctgtgttcttcccgctccagggctaggggcaaggtaaagcattgtcgcatcaaccgggacggccggcactttgtgctggggacctccgcctattttgagagtctggtggagctcgtcagttactacgagaagcattcactctaccgaaagatgagactgcgctaccccgtgacccccgagctcctggagcgctacaatatggtaggtggtggactcccttgtgatttggtgggatttcttgtctgaggttgtaactcatctgttcatgaattcagcaaacctctgagtattcaccatgtatctgatactgctgtaggtcctggggatacaaattgagcacaacaaagaccctgccgttgtgctgcttatagtgtagtgttggggagatgcaacaaatgacatttaaaatatccatagcatgtgccagatggtgatgagtgctatggagaaaaacactgggcaggtggataagaggatacagagtgatggggaaggggttgaagttttcagagggtggtctaggaagatctcactgaaaaggaatgagccatgtgggtatgttctggaggaagagaggatagcatgcgcaaaggtcctgaggtagaagcctgcctggaggcaccaagaggaagtcagcatggccggaatcaagccagcccaggtgggggtagagctaaataaggatgagggttcacaggtgacttatcatgcaggggctcataggccattgtaaggccctggctttttctctgagtcattggagagttctgggtgcaggagagacctgatgtggttactttgtctccattcctaccacatagatcattaatttattgaagagagatttatggcatcccgatcatgtgccaaggactgttctagatactaggagtactgtggaacaaaatctgctttgggaaatttaggttctggagaggagagacagataatatacacaattaagatgttttcaggtagcatgaaatataataaagcaaagaaaacaggatagtgtgaaaaggggtggacactaccttaggctgtgggagtggagatcagagaaggccaccttaaaaggggagaaatgtgagccgaaacatggaagatagcagtgaatgggatctggggagaagtgaatgaaggggtgactctaggtacaggagtggccacatcacaagccctaaggtgacatgaggaacagaaagaagagttagagaggaacagagaggtggtgggggtggatcttgtcagtggtgtgctagtaaatgttcaaacagctctcagcggggtaggggaaggcactggtttgtagcatttgccagtttccatggtgtaaatacttccatggaggtcagtttcaagttgttgatgtgctgtcgttgaacctggaacgtggagtcaggaagtgatgtacacagtgggcttttgtgagccgggaggtcactccagcacaccatcgcatcttaggatttgtgcttttacaaaggaacgcagtgcctggcacgcagcaggccaggacagggcctctctgattttgggttagtttccaagtctggggaccttctttatagcttcttcctgtgtctactcatgggccaaaagaaaattctatgaggtttcaactcctctatcaaaggataggtaaccataaggaagcctagaacccttgttatatgtaagggctattccaggagcatggattattccatttctttctttstttttttttccaggaaagagatataaactccctctacgacgtcagcagaatgtatgtggatcccagtgaaatcaatccgtccatggtacggtgccgaacctccaattcacatgattttggagtcacgaggctgatgtggattccatcttgttcccatggcagttataacagggcaagggaagactttggaaaacctggccaaaataatttttttttttttttgagaagaaaggatgattgataatatcaagcctagtttcagggaaaatgttaatagaattccatccaaatgcaacagtgttttgctaaaattctgaggtttgacgaaccacctttgggccaaatggcttctaatgaaaagtctttcaaatgtttttggctcgctgayagagcctgtggtgtttataaattccatttggttcactgacctccttgcagtgcaaatgctrwctcatattcccaccctgactctgttgtgtaatttcatgcaggtagggatggattttactttcagccctcggctcctccttgccatgctttcatctcaaatttagtttgagccggcagaggaagaaccgcagcgaattttctgtttgggggccatgtggcacacaattagtgtacaacgctcacttaggaaggggccctgcttgtgggctctgttgaaatccagagatgactttctttttcaaaaatttataatccatggccaatgcagatctgtttcagaaagaaatgaaatcttgaaaagttgtgggcaaattgagctgtgtgtgaaatgcattaagagaccttagtagcaaaaacttttgttagtagtgaaggatgttttggcgatgagaacagtcacctctctaactgatgacttttccttcctgtggccttggagactggctggtccttatatccacccttgaagcaggatacgcaagtagaggctgctctgtttgcaggtgggggagagaaaggcaagggtactgcttagcctctggcctccagctgcagatccctgtggcagagctcctagaacccacattgcttcttatgaaacatcatgcactatggcactaactcacattgatggatccagttctgggctgagccacttaaaacagctggtcgatgtggggcaaattactttctctctctgcatctcagttttctcatctgcaaaatgggcatactcatataactacttacctgttatggttgcttaaggattaaaggagataccttaaggcttggaataatgctttagcgatactatagttagcacttaagaagtgcaagctgttgtcagttttatcattatacacatgatctcatttagtagtcttaacaaccctgtgaaatatataaaaatttaattcccatttcacagacgggggaactgaggatcagagagactcaaacttatatcattattcaagggcagagcaatgatttgaacctacatatctgactctgtagcctgtgttctgaggaaawattttactrggttccctgtgaaattcctgttcccatttcctttgggtgggaggagaaggaagctgctcatttaaacaggtttgacaacgtcagagcttttcccactaacatttgcttgccgtgtgggtgttcatttatgcccgccaggcagaaagcatgaaagcaaattcattgaagaaaatttctaaccaaggaagttctatcttatttagttctgtgaacagagaccaccttttgatgaatttcatggaggagaagctcagttactcttgcaaaatgtcagggtcctgcaggagtgtagataggggactgctgacctacaaaaacagagcaatgaggccctcaggacaggcaggaagaatggggttgcccttgagcttctgggaggcttgctgagcaccggcactgtgatgacagtcttggcttaatctaaaaggcatgtcctttctttgttgaggaaattgagcaatattgtgtcactacaatatagggtcactcccaccctaaccctaagcctaaccctaaccccagcsctaaaccctagccccaaaccctaactcctaacccctaacccttaaccccaacccaggtacccttggctctgactaggccagttctccttcactccctggtggctttttggggccttggatcctttgcaatgccagtccctctccagcagatgactttgtaaccttggcctgaagcctcctgctccccaatgagaagaaccaaatggtacctgggaacgcagccgcctccctcccctcctgtccctggcctgaccttttccttcttgttttccctgaaagcctcagagaaccgtgaaagctctgtatgactacaaagccaagcgaagcgatgagctgagcttctgccgtggtgccctcatccacaatgtctccaaggagcccgggggctggtaaggctgagtggaggctgggctgctyggcaggtgggcttgacttgtcccttcttggtgataagactcaggtgctggccaagtctgaccccctttgtcatcckgggctggctttgacctcttgtgttaagtcccttcttaggaaggtggcttggtgcatgctctatttgagaaaatggataaacawcaatattaacaggtatcgacatatcatatcatatattgtatattattataattacaacagcagctaccatttattgaagtctttctaagtggcaagcagtctgctaattgctttccatgcatygtctaaccaaatcttcaaccaaatcttcattactccctgtgacaaaagatgcggcaaatgagactttccaagtcacacaaataaatactaaatactaaatagtgcaggcgctttccaatacacaagactgtgtgttatttccaattcaaattcgtatgctgttccatagtcccgtgctgtgtgcaatggccacatcctgaattgaagacaatacgtttttcgtgcaaaggtacctgggtatgctagggtttagttaccacttcgctttttaaccttagaagaaaaattcactgcccactgataggtttctgggcaagtggttttgtggggtgacttctgtctgagagcaataagaacttgctcataatagtgagcactggtttaagcacctcatagactggcatttctgcctcccacaagataactggacctggcttaggaatctgaatagcagcatgcatggagtgcttctatgtgtcaagcactgttttaagcacgtttgaaataactcacttcatttgaaataactgagtctacatgatgactgtaaaaggttggttctgttgttacctgcattttaccgatgaggaaactgaagccttcagaagtgcagtcacttgtccagggccacatagcaggctgagatttgaaccgccaggccttytgactccagagcttacactcttaactycrttcatctgctaagtccttccctgtcctcttgcaagatgccttaatccagggattatcaaactttttcttaaaatcaggagaacctcattgcaaacsaattcatacctagattccacagaatcaaagatgcagccgagttacccattgagctggagtgggggcgtagaattgccctgtttggcctccttsctgacattgctgttcctactgcagcctctgatgcttccccttggaggctcccagacccagttgggcaaccacagtgttgtccgtctgcttctcccagttcagaggctcggctttgccgaagtccctccactcgaagtggcacagagttgaggtctcttccaggcacactggcgttccctcactgggctcctgtccctgccttggtcaacatcctggtgcgcactgggtgggtgactaacaacatttttggagttgtggctggagcccaggtgactactccaaatcacggttttccattctgtgtgagatggcctcatgcctttctatgcctctgacaggcagttctctgaatttcgaaggctcttgtcttaagagactgtcagaagtccctttggcaagggactgtgggcaaaccgcccagcggctgtggtcaattcctctctctgatggcagtagtgctacctagggggccgcctgggtgaaaccggcttttttgcatacttccaaactggttccctgtagctaggggaccaaacaattattgtctgaaccaagatgctcctgagagtgaagagaatgtaaagtgctcagtcctggacagatggtatatatgatcgccgtaaatacagccagcccttgccagaagtgggtctggagaaatggtgcgggggggcgtgaaaagggcttacaacccgcagtcctgtgtctctgctaggtgaattggtagcatcagtcctcactctgcttattcagaccaaaaaattgttaagttcttcccaccaccacggagcacagacttgattaagatccagaaaggtcagccgggtgcagtgacttgcgcctgtaatcccagcactttgggaggccgaggcgggtggctcacttgaggtcaggagtttgagaccagcctggccaacctggtaaaaccctgtctctactaaaaatacaaaaattagccaggcatggtggcccatgccataatcccagctactggcggggctgaggcaggagaattgcttgaacccgggaggcgaaggttgcagtgagctgagatcgtgccatgcactccagcctgggggacagagtgagactctgtctcaaaaaaaaagaaaaaaaaaaatccagaaagatatcatatagaggggaagacagatgtataattatacgttaagtataagatgtggctgctcagatgactgtggggacaggatgccaggggaccacagaggaagagtgctcagcctagggggcagtcagggaagactccgtgggagaggaaatgcccaagctgagtcttaaattagtggggggaagttgggtaccaagggcatgggccaaggcatggaagctaggcagcatggcaggggcatgatagggacgacgggccagctggagtcaacatcatggagagttaggaggtgatgtctgggagtcctggggtcagactgtgctgggccgtggctgccatgttgaagagtctgggctggattctggaggccctggggagccatcatgtggtgtggtcagaggtgcattttggagagtccctggctgcggaaaatggctcargagatgggcaggttgaaggagggggtttgcatgtctgggcacggccttgccgggaggaatcttagaggtgctcaccgtctggtggggtccaggaacattcatagatggattatgtcccgtgttgttagtgttgttataaagatagggaacaatgttttagctgaataataataagagctaacactattgagtatttactgtgtactaggtaggcgctgtcccaagcactcagcttatgttagtttagagtcctaataaaaccctctgagggaagcactcacgtttatgcatttttcagatggagggttggaggcacagaaagcctccaccatcagtggtagagctggagtttaattccagcctgtctgcctccagaaccaccttctctctaaattcacaacctccctgaaataggggtgaacttttgtcttgtatggtctctgacttccacgtaaagcatggaaacttttgacttgtgatctttgattaaacattaagatcatgtgatgggggtaaaatcagcccccagtaactcattcgtaattaaaaaataaaaagacagcagttgcctttgagatgctccattgtcacagatagtgacactggtcacttggccacttgctgtctgtccccatcagaattgagccagcagccgggtgcagatgagcagtagtgggtaattcatgccacctggtgacagcgcccccatgtcctctcttcttatccaggtggaaaggagactatggaaccaggatccagcagtacttcccatccaactacgtcgaggacatctcaactgcagacttcgaggagctagaaaagcaggtgagtccccctcttcgatcctcttacaggaagaagggatctgcaggtccagtttttcagggagctgtgccatctcagtgggtgaatttttccatgtgctgcttgtggtctctgtggagctctggatcagggaagacacagtgatgatagggaaattgagattgagttgttgtgsgtgagttgctgtgacaagccggccgtgttttaatcaggttgtgytgggcttggaaggatttgaatatgcaggagaattcccgctggagtgaaagtgaccaaatggggaatttgtcctttgcttaagcaacttgcagatgaaacacatttatattggacagccagacattgagaacgtgcttggggcgagtaagcaagtgggcctaaccagaggtgagatgaggccttcctggtgactttgcaaacctggtggttgttccctcgccgcctcttgtttagagagcagccactttcagcgtgctrgcacyccaccaaggatgatatctttgtaatgaggattttaagatcccgttagacccccaggtgtttattttctaagggakgtagggcaatctgggaaggcttcctggaggaaggagtatttgacccttaaaagtcaagttagagttcaacagcaagagactggcagaagagaggtgcaagtgggaggtacagtctaagcaaaggtgtggcagtgggaatgtggttgtgttccgtgtgcttgggctgaggcagagactggaagcccttgcttcctctstactgagttgcccttacctgtacatcagcatttacctggtgcagggggtggggkttggggtggtgcaggcaaggagtggatgcctggttctgccacctctcccccaggatattcttcatctcagccagaccctgggatggttcaagggtgcaatgggaggcagagctggaaagggtgatgggggctctgaaagtcttaaaagccaggtcatagagcatgggtgttgcttccacaggacatggggagccacagaaggttcttgagccgggctttagtaggcaaaatagtctcattttctaataaggtcagataaatagtctaggatgtgtttkgaaaccagatctgaggaagcattatgaaacctgttctagaattcacaaggcacgtttttacggattggaaaatgaaactccgaacctcctggcaccctctccccgccaggtccctatcagctccatgcttcattatttagctctctccccatggacgtatctggtaatgaaaatgcattttaaacagttccacaggcmgtatctctgctaaacggtgtgctttggaaacgggttttctttttattattcccgttacaactaacgtgagttatgtcttgtttcttcacagattattgaagacaatcccttagggtctctttgcagaggaatattggacctcaatacctataacgtcggtacgtgcacacatcatcttagcctggatttccacccctatcccccatgggctgacctcagccccgccctacacagggaggtggctgacacagggtcctgtcttgaatgccagctccttccctggctgaagctgagtatttaggtcaggctggtcagtgagtatgatgctatgtctgctattaatctctactaaaactgtaagtgctaaaacaaggtctcgtacataagtgctagatggtggttagcggatattattaccagcgtcactcttattatttcaggatccatctgtgtttcccaygcgttgcgaaggaaagctgagctgtcagcctggctgaaatgccgcgtggagttgggagtcttgggttctaaacccagctctgcctctctstcgctatgagactacaggcctgtcacttctcctctttgaacctctgcttcctggttgctcggctggggcccaggaaacccagcccgcccacgttgaccatgctgcaacgggatgtgaaggcgtggccccaaggctaggcttgtccagtggtggccagggtctgatgtgtgctgggtttcctgggtcttgagcctgcctgctttgaagtgggtgtggtgcagctcccatgtgaagggactctgtagcgggcctccttgttctgggcagcccatgaccctccctgggcaggcacgggcatgstcccctaggactcaggtgacagcagccccaggaacttcctgcttctattgccaatgctctgctttacacattcattcatttattattatttcttttcgcgatagagtctcgctgtgtcacccaggctggagtgcagtggcgtgatcttggctcactgcaacctctgcctcctggattcaagtgattctcctgcctcagcctcctgagtagccgggactacaggcatgggccaccgtgcctggctaatttttgtatttttagtagagctagggtttcgccatgtkggccaggctggtctcaaactgctgacctcaagtgatctgcctgccttagcctcccaaagtgctgggattacaggcatgtgccaccatgcccagcctgctttccacatttataacctgcttctttacctttacaatgatccagcaggataggtaggagagggattctttgctccgattaccagatgggaaaatcaaggtcctaagtgaccgaccaccacatgtgctgaggtcctttgggcaggggggtgcaggatccctgcatccacttctggtgctctttgtatcatcttcccccatccctgtatctgcagagcagaggcacatggctcattggttctgagtagaaatcttggagtcaggtttgaactgagcctcagttttactactactagctgtatgactttccacatgttactttctcttaatgagcctcagttttgcctcctgcaaaatgggcctagcaaaagcagggtgcctttagtctcagctactcaggaggctgaggtgggtggatcccttgagccccaagagtttgagaccagcctggataatgtagcaagagctcaaaattaaaaaaataaaataaaataaagatgcagtacatgtaatctgcttagaatattgcctggtatataagagctcagaaatcttagctactaatattatttggcagataagtttccctgtcataatcttttcttctctgtaagatcctttctctgtgtctggagaacccacgccacatttctctcctagtttctggtgactctttggtgtttttggctcatggctgcattcttcagtctccacatttgcctgcacatggctttctcccttgtgtctgcatctgtttttaaagccatttagctgggtgtggtggctcattcctgtaatcccagcactttgggaggccaaggtgagtggatcgcttgagctcaggagttcgagaccagccctgggcaacatggcgaaacccctctctacaaaaaatacaaaaattagccaggctttgtggtgtgcacctgtggtctcagctactagggaggctgaggtgggaggatcgcatgaacttggaaggtggaggctgcagggagccaagatcgcaccactgcacttcagcctgggtgacagagtgccaccctgtctcaaaaaaaaaaaaaaaaaagccatttaaattatttattctttatatgtaaaagattatatgtaacaacatagaaaattatgcacaatatgctaagtgaaacagttcacaaaattttatgtattgtatgtaaacattttgtaaaaatgccaagttgcttagctatattttaaatatttttaaaatgaacacgtattgttttagtaatttgtaaaaaatatttatgatgagtgtaaaaagcattttctaattggtcaaccaaaaagatattcagtgtttcttttgatcaagacgaacacatgtctataactaaagtggacaagagggtatttttttcaggttctctcatgcattttaatgtttgtttttttttcctgcatsttaagtgtccctctcctttctcttataaggatactcatacttgttggatgttggaattgccctaaatccaggataatctcatattgagatccttaacctaagtacatctgcaacgaccctataaggtcccattcacaggtactggtgacctgacacatcttttcggaggaccctactgaatctactgcatcccttgagtagtcatctgtgatgtgtacttaccccgatggaaagtagacgtccccatcrgtgctaaccgtggtcatagcagtggtggttggtccatgagagaaacagctcaggcagggtgcagtctggtctttgtggccctctaataggctgattgggacatttcttattctcttaccccaagtgaaagcccctcagggaaaaaaccagaagtcctttgtcttcatcctggagcccaagsagcagggcgatcctccggtggagtttgccacagacagggtggaggagctctttgagtggtttcagagcatccgagagatcacctggaagattgacaccaaggtaggcacctgctcacccgggtgcaggtgggcctggcattctgagggctttggtgctcagttgggactgtgggtgggtccaggcagcaggatgagcaggcccaggtcctactcagaattcaggaaggagaccaggtggattcagacaattggagcacctcttgttagagagaggcagggatagtggaggtgccctgggaaggtgggtctggttgtctggttcgaaccttcagaaggctgagtgcctgcagcaatgctcattgatgatgtctttgcggccctacatatcttaccaaggaagttactgccttcctcattttgaatattttctttctaagtatcatataaagcagtctggatcctcctgacagaaaacgttcactgagctcacctgcctggagctggaatgggctctgggaacatagcaaatcagcgagacccggttctttccggtggaggaacttcccctctagatgggagtgaccttttcagggctgtcctacctgaagtactagtctctggctggaagtgttttgggaaggtgtgagcttctggataagaataggaggtctggaattgggcagactggagtttgcatcctggcaggggctggaccctgggcaagtaaccacacttctctgggcctcagtttccttgtctgcaaaatgaggagccaaattcctaactcacaagtacttaatcactgccttatcattatatcagagcgacatgggaaagtgccaccctgtcttcgatgatggagtaagggctgtctgttcttgtggctgcmgaactggaaagaaattgtagggtttcccatgcacccatttgtttctaaggtagaacttgacccaaagggctgattaaagccttcctggggcctcttgtgccctctgacttctggctagagtcagtgagtctctcctccaagatagtcrcccaccagtggccaggtcatttttttccccttgggagggcctcacatcttggccagtccctggtcacgagaggatccttgactcactcaactcttctgcagggaagtgtcctctttaggagactttgcagaggggactggtccatgggtgccctcgctggtggggcatcgtctttctctgacccaggaactcctgggggccttccctagggctcctaattcttcccatggcttttcacaccaccagccatgggggaggaaccatgagcttgtagccagctgcgctgtccttctggctttcccagtgaaaccatctcttctgccctccagtgtctctgatgccacagtacagctctgaggcacagggrggtgccacgaccctgaggtttatttaaaaaatctccaaatagtgcactccagctctctctactttgcttaatgtggaaaagtgttatttccctagaaggctctgtctctcccctgcctcacacctcctctcctgccgcgtgaaggttcctgaaatgaagctgagctgttcaaggttgctgttggcggcctttggtctgcattcctctctaactggtttttatatttactgagatttcatgagaatgatttttaaagtcctgttattacatctgaggggtaaaaaaactgggacagtagagttgacggagttcccacactgggcacagctaccccttttgcggagctggtgttggggagcaaaggaagaaggccccatcccactcttgggaaaccagcggcggataaactctttgtcactgccaggacctctgcctgtccctaagtgcccgcattgttacacggtctgtagccacctcattgatggcagagggcagtcacaaaatccttctagttagtgggtttccagagcctcaccaactgtattgtgacttcccattctgagatggcttgaggggtgacagctgcaggcctggagagtaattgtcatgctgttttttkttttttttttttgagacagagtctcactctgtygcccaggctactcaacttctttgttaaatggagataattctccctgtcagggtgtggattgacttaggtaatatccctcaagtgcttagcctgtgacggctagagctaagcaccccccaaacagtcaccattattatctaaatattctctcaaggtccccccttggccaataaaagtctgatagaatttggggaggcccaacagggttgcctgctttggggtgaagtgagaagctcatccttacatgcaaggagttagatttgatggtgggtcttctgaagggaggtacctcctgagtccatggcacatggcctgggcactgggtagtggtccccttggacagagccctgatgggcagtcagagctggggagcaggtgtgcaggttttgagggtgcaggggatagagagttatgacgaggatgctggggtccacagagcccccgaggatttgaagaactagaatttgagacactctaacagtgtggctttaggggaggggacaggaggcagagttaaagacagaggggtggtgacagagaagagcccccttccatcctgacctcacctatatttgagggctgtggccaggactgagctgcacaccaaaacctcgtggaaacagctttgtcgagaattttcacagtgagaggaagaaacgagaggggcagggttgtcttcaggaaaggaaaacattcaaccatattaaagatccgagtgtgcaagaaagcaaagtggggatggaggaggaaaaatgcagggcgagctgggaagatgggatttctcgggggcgggcactaaagacagtgaactccaaacaggagaacaacatgaagtactgggagaagaaccagtccatcgccatcgagctctctgacctggttgtctactgcaaaccaaccagcaaaaccaaggacaacttaggtaacatctttcccaagaacatgccctataactccaatgaaaacttaacttcctttagagtctgatattttcagagggggcagagagtgcattctctcattcttaactactcccagtagatggccccaccttgggtttgtcctccgagtgagggagctggtggcagaagcttttttggtgtattagtccattttcatgctgctgataaagacatacccaagactgagtaatttataaggaaaaagaggtttaatggactcacagttccacgtggaggaggcctcacaattatggcagcagaggagagagaatgagaagcaagtgaaaggggaaacccttataaaaccatcagatctcgcgagacttattcagtaccacaacaacggtacaggggaaaccacccccatgattcarttatctcctatcgggtccctcccataacacgtgggaattatgggagctacaattcaaggtgagatttgggtggggacacagccaaaccatatcacccacttagtgggtggatttagttcttactgccattaccacaaacttggtggctgaaaacaacatttattcttgcacagtcctggaggccagagtctgaaatcagtatcatgaggtcaacatcagggtgycagcagggctgtgctccctccggaggggaaagccattcccttcttccagtttctgggggctgctggcattcctyggccttctcctcttctgcttccctattataaggacccttgtgatgcattaggtccacctggatattccagaataagcctcccatttcaagctccttaatcacacctgcaaagtctgttctgccatataaagtgacatgcacaggctccagatattagggcctggacatctttgggggccatttaaaaaaaaaaagaccttctaccacattctccaggtagcaagctttttgatgatgctgtacgtatttttttctttgggtgttttgagctgcttccatatctttcatcttagaacagaagaccagccagacaatactagacccctcagttaacttaccgggaggccagtccctaggaacttctaccttcagggactcagcaggctcagcatgttgactgccgggctatcccaccacagctggatgggagagaagatgaggcctgtccccttccctctcctcctgttctcccttccctgcacaggcacccacattgcaaccctacctgtgggctttggcaggtgattctcagtttgttcatcttgtgtctgtggtctctctggatcttcccctcccaagatcttctcytacccaaaaccattcccattctccctcttctataactgtaccacttttgtgttttcttgttcaaggatggtgatagtttaaaaaaaaaagtaaattacagtaattctagcctaaaaggtggtgggaaaactaggcccctttttaatacttggaacccccagagggcaagagtccacagtgataccaattgggacaatatcatcagaaccccttgaatgtcaaagagggagattcctggtttccttttataatctgagcatccagccattgcagcaaacattaagaaaatgcacagatgagacacagaagtactgatgacctttttctctgtgtgcagaaaatcctgacttccgagaaatccgctcctttgtggagacgaaggctgacagcatcatcagacagaagcccgtcgacctcctgaagtacaatcaaaagggcctgacccgcgtctacccaaagggacaaagagttgactcttcaaactacgaccccttccgcctctggctgtgcggttctcagatggtggcactcaatttccagacggcaggtaaaggccgactgaaggtagtcccgtccctgcaaggtggcggttgcagtcactccaggccgagtcaccttgggtcagcgataccatgtggtgtccaagaatgagtgatttgtccgagggactgcacggttcagcagagtaatggttagtatgaggtccagcagctgaatggagggatgagaggaccgaaggctgcttggcttasgcaggcttcgtgattgtaagtaagtgacagaggctgagttagtctggcttagaaaaagaaaatgcattagttcatgtaattaaagcatctttggagttctcttctccaggcctgttgctgtgtgagggctttctgctcagactttcttccagagacatttacatgctggcrtaactamcatacacaaacttctggacacaaagtgatcgcataaatcayggggctttgtgcttttgttgttgttatttaagacctctttcgagggatctattcatcagtagcstcctttacattctttttatagccrcatcggattccacagaatggaacaatcatttatttaataagtccccgtggaggcacatgtaggtattccccattatttgctgtcatagacagcactgccttctgtaccctgacgtgagcgccattccacagatgtaggaatatgtctatgggacagaattctcagaaaggcagggtgggtcaaacagcgcttgcattttgatcaactttgccctgaggaaaaccactgaagacgtgcctgagctaagccacactgccaaactgccctccatagagatcgtgggcggggatgcaaataggtggaggttggagtacgctcttttggtatgacttcgctgagttttgttgaactttttgccgtttgcacaactgagaggtgaaaactgatacatcgtcgtccattagagcttcttcttgtaagggacattaaccagtttttccctyatttagggagcagtggcattttcttttctggraactatttgtgcttcttacctgatgtatctactgcagtaggtatttatagcatagatgtatcagaactaagaggttaaaaatttatattcacatatttgtcatttgaattaaaattgcctatgcaatttattgctacatagacacttttagcaagtttgaatcttttcttttatgattcgggatttggtgacatacttggaaaggtgttccccagtctgggagtttgctgtctagaaaccctatattttctttgagtgagatacctatttgaacagctgcctcacattaatttggggaaaaggtgaaattcattccccacctagaaactcctggcctagggggccagcgtgctcatgcctgacttacagcaggcgttcactttccttcccagataagtacatgcagatgaatcacgcattgttttctctcaaygggcgcacgggctacgttctgcagcctgagagcatgaggacagagaaatatgacccgatgccacccgagtcccagaggaagatcctgatgacgctgacagtcaaggtaaagccagccctcccttcctgccaggggagccagccgccstccctgggggctgggccgatgctgtcttgagrgcagggaacccatgtctagggaggctggttgtcttgtttaaacgatccccattcaggcagtgtttgaggatcttyctttcttacagtacactccrgggtcgttctgggagaagagggaagagaggggaaacctcctcaaacccacttccccttgtcctctgtgggggtgaggtatgaccctatctttctggggtcctggtgaggtcagcctctggccggaaagagaaagaaaacatgggaaacagccatttggtcttaatggagaagttttttcccttactttgtccaattccagggctttttaaaattcatctgactttcagagaaagtgttgttgctttgtaagaatttttgaaaagtagagaaatgaattgcatttctcctaagrttaagggcgggcgggtggtagggggaagaagcatacgtaaacacaggcctttaaataaacagcagttataaaaagaatgccacactgttcctcagcctttcctaggggtgtggaaatccagtgattaagctctgccttgatcagaggcacctgcttgggcatggatgtgtgcattcatgagctcaggtgagttttacctgttgagtcaggtggcatatggggccgagacccaggctgatgctgaggaactgtgggatctaccacagtccaccttcatccactgcagaaggttgctccggcttttccagtgaatctaggmaaattagggctggcattgaactcatccagtgtcactctagaacccagctgcaatccacgctaggctgcctgttcaggaccccaggggggttccaatgcttccctttggtgtcccaggttctcggtgctcgccatctccccaaacttggacgaagtattgcctgtccctttgtagaagtggagatctgtggagccgagtatgacaacaacaagttcaagacgacggttgtgagtaagtcagtcaccttggcccctctgcttttaaacgtccggccagtgaatcctttgtgggagtgctcttcgtgggggattttgcaatgctctttagttgtcccagggttttctttcctccctcttgcccacatggttcagcttgaggaggggatacatacaaagggccactttctgaaatccttagactttccccagtgctgtttgcctgcctgtaactcaagtccggaatcgtaggtgaggccctgacactaggttggtcctctctgtgcaacagcccaatctgattaatctcctgagtcaaaggccaagaggcagagacacagagagagggggtgaacctacgtggctgacctgacccagaggatcagcctaacctgggggatcttagcccctagagggcaggagggacaagaggaatgcttgctcttccaggaaaagccaggagggaaccgtgattggtgggccttctaaagcacaggatccttgcccctggtaaaaagtagcccaatgaacaactcagatgctgaccaaataaactggcatttatggagagtggcaggattgctgcttgcctgctctgtgaggctgggctctcccctgccagctgtagaaccccctgctggtggatgtggctcccaggctctcctccccttttgtcttttccaaaatccaccttcctgctctgcaaacaaacacctcccccgttcccttgtccctgatcctggggcggggagatgggaggtggtctccttcctctgctcaccaagggaccagcctgcaacagcagcttccaggattgctcaaggtggggtgggggagtgaagataattattcagattttcttagatcttggcatagatgcatatttatttacatggttgctaaggggattcacagctgaaggatgcggagattgtctyaccagaagggggcagctccaatgtggcctctmatgagctttgatctccttccagatgataatggcctcagccctatctgggctccaacacaggagaaggtgacatttgaaatttatgacccaaacctggcatttctgcgctttgtggtttatgaagaagatatgttcagcgatcccaactttcttgctcatgccacttaccccattaaagcagtcaaatcaggtaagaggcattttaattaagatgttcgatttgggctggcgttgtactttggtttggctgctggcttcaaaaagaatgaaaaatgatttttcctggtttggatggaatcactgtaaaaccgatygggtggcttggagagcwggtntacagcctgtcgtgtagcacacaggtgggaggaagtgggtgacaggggaggctatgcccctcaaagtgggatgtttacaagcaaaactggattgttagtggatcctcaacctggcactgcagtttgatttcattttgaaatattacatgcggtttgcttctccctagctagggctaagtctggtttgatctccccctcctgctctctggctggcagtgtgagagggtggcaagggagagacctttggcatcttgsggggggagtaacaatctcgagrgtccaactccccaaacccttcagaattcaccttcttcttctataaaattgggtgggttaatttacttctttgagttgttacagttttcttccctgctgaagaaaacacaagatcccttcatggtataagaagggtcattttgtatttttctgcaaccaagccaagctgggtcatacraccagctcttaagaaccctgctgaatcccagatgactgagcccttcctacacagctgagatagdcacttccaggtgaggggatttgggaccctgctgcttctagagccagtcatttacaaaaacaaaaaaaactggctctccttagcttctatatagtttctctagtttactttcccactggatctttcccactggattttaggtataatatttgacaaataggcccttgctggatgttgaattttccttcttcctcttcctttagtatttctgatgcatggtgcatgagatatgagatcatagattcttctggattcctcaagaggtcactgttcccttgttttctgaggatcatttttcaagagaaagatgactgtcattttagttacttacataaaaaaatacagtcttttgatattgtttggaaacgtggggctcaatgaagagctgaattggatcttttttgttttcagacattccctcaacttccacctttttttgtataatatcataaacctgaccatttctgctactgggcaggagcccagtttctgagcagcaggcatgctagaaaatccaggtgctggccgggcacggtggctcactcctgtaatcataatcccagctacttggaaggctgaggttgcaccactgcactccagcctgggtgacagagcaagactcagaagaaagtgcaggttcctggacccaccacagggtgatgagtcagcccagggtggggccaaggaatctgcatctttaggcagctccccagatggtgcttggatggcactttgacagaaccaaactatgtcaaggctgcctatcttaccattgaggaaatgaattccttagcaagttactagatgaaacaagactttgggaaaatgtttaaagtttctgatttttttttttttttgtactctagaaatgttcattttcatgaacattgctactctagcaataataatgagtattcatttgtaagaggcctgatatttggcaacccttctgggttaactcacccacactgtaaactcccccyttttttttttttgagatggagtcttgctctgtcgctcaggctggagtgcagtgggtgatctcggctcactgtaacctctgcctcagcctcctcagtagctgggactacaggtgtacactaccacatctggctaatttttgtatttttagtagagacggggttttgccatgttggtctgaaaaaaagtgatgggattaaaggagtgaaccactgtgcctggcctataaactactttaaacccggcactgatcagggctgtgattccttaatttgcttcttttagattagtctaataaggcttaggaatgacaccaattcttctggtgcaggaagtgtagcttttggtacacctttacgttcctagccttgackctgtaacagatttctttttatggtaactgcctgccagttcctctactgaactcatccagcagagaggggcagctgtgctgaaaccccttggttaccccgacgtcctcttgaaggatgagggccttgagcctcataacccctcccagtgccktgcagagatgtcagagttgatgataaaacctcgttaccttaatgggcatcaaagtgtgtcmattcatctgcagaatgcaatgacttagcttggagatttrgaaaaaacaaaggtcaaaacctcaagggagattaaaaatgtgaccttstcctcccccgactgtgagatactctcagcagggacctttcctcacttctttctagctcctagcagtgcctggcacatccatattcatgggaggaatgaaatagaatgaacaggaggcattgagggtcttccatactgaaaaaataaacttcacccattgtcattagagatgcactgaagcttttaaaccagttggagcgcaggaaggaaagcagcagcctttattgtgttaggtaccttaaactctttctcttttaatcctcacagtaatcctgtgaaaggggttttatctttggttttaaaattctgagcactttgaggccgagagactatgacttaacttgctcaaggtcacacacctgtaggaccagagctgagattcaaacccaggaatgtctaattaatttcgaaccccrtgttcctcctctgcaggctgccctctcactgggtgctcaaagccagatgcattgatcttactttaaaaggtgtctgtatttccctttccccagtgaaatgactagaaacaagaagaagaaaaacaattattttwtttttttttatacaaggagggctgcccagtgcataaaaatgggacttgggcagcgagagaaggtacatagagctggagacagctggtcatgagggcagagctcatgtctccgatttaagaggcacacgcctagtgtcagatagtactgtccagcctggaaccatgctattggagtgkaggggctacctgatagcctcccggaaygccatggagcaaacagtcattccagttcattctaacagtcaatcagcagctagactgtattagtccgttctcacactgctataaagacatacctgagactgggtaatttataaagaaaagaggtttgattggctcacagttctgcaggctgtacaggcttttgtttctggggaggcctcaggaaatttacartcctggtagaaggggaacaagcacatatttacatggccagcaggaggaaaagagagctagtgaagggggaggtactacacacttttattaaacaaccccatctcgtgagaactcactatcatgagaacagcaagtgggaagtccacccccattatccagtcacctcccacccggccccagctccaacagtggagatcacaattcaacatgagatttgggtggggacacagagccaaaccataacatagatttcttcaccamtgtccacagattagctcattagagatgcagaatctcaggcctcaccccagacttcccaagtcagaatctgcattttaacaagattcacaggtgattcacatttgcattaatgttggcatatcactgggctagwctgcaagaattctgagtctctatcaaggcaaaaaacaaactagcarcaaaaaycacattgtagcgatagggaaaaataggtcagaaaacttctttacagcagtatattcaatgagagcaatgtccccataaaccctaccaggaaatgagtgggtataaaacattcaggttttataccccctcaaactgtcactcaagtataaaatcaaaggatggatgctctcaaacatgcacagctcaggaattctgtgtcccatgggctcattttgaagagaacaaaagaggacaaatttagccaatgaaggcatccacggaattcagtaagatgatgagcatccagccattaaaaaatataaatttgtacatttccttatgtataaaattgtgtatcagaagaggaacactgtaaagtaatactgagctstgggtggtgagatgcatgctggggaaagtatattgatgtctttgtcatactttgaattgtatacataaataagatggattgatgggtagataaatccatgacaaaacaagtacagtcagccctctggatctgtggactcaaccaaccaagcttgggttgaaaatatttttgaaaacattatgtatcgaacatatgcagacttttttcttattccttaatacagtataacgattatttacacagtatttatattgtcttgggtattaaagtaatctaatttaaaggatatgggaggatgtgcataggttatatgcaaatactacgccactgaattaattatttagagacaaggtcttccctctgtcactgaggctgaaattcagtgttgtgtgatcatagctcatggcagcctcagactcctgggctcaagcaatcctcctgcctcagtcttcctagtagctgggactacaggtgtgcatcacygtgcccagctaaattttttattttattttatttcttgtagagatgggggtcttgctatgttgcctaggctagtcttgaattcctggcttcaagtgatcctcctgccttgccctccccaagtgctaggattacaggcatgagccaccgtacttggccaactatgtcattttatatcagggacttgagcctccaaggattttggtatctggggaggtcctgaacgagtcccccatagatatcaagggmcaactgtagagtaaaagtttcgtacaatctaggtggtgggtatacaagtaatccttgtaattttttttagtgttgctgtatgtttaagaattttatattaaaatgccagaaaaacataagcctccctttgtgggagaattatggttacaaaatggaatgcaaatattatataccatgtccatacagaaatgacaatacaccttaggggtgtaaaaggagaaattggggagagaaaaggaacaggtttgtgtaagaatgtgaccttcctcttcataagcagcggaaagtgagagattcagtggatattgtttgaaggtgataaagcaactgagagtataaaatgttccaagagaaataagcccaaaatctgaatggtggaaggcacagaggaaacagtgggagtgtcctattttgggcattacttggagaatcagtagatatgatataaatgctttcaagacaaactaggaccacagaaaccatctctgagatacaatgctaactgggtaaggcactatcatttgtgattaaaagcaactcaaacatatgcataggcaatcttgggaaagatactgttaaccgtggttccttttaggacagagaggaggattgggtgggagtgaccgttctgtttcagccctgtgttcttttataytaaaacaagccagcaaaccaacctttgagatgtgttgccttaaacattactgaatgggggtgggggagattcggctccaacttgcccccctcagccccaaataaaaagaaacatttaaatgactgtgaaagacaggtcctaattgtaaagagggaatggctttaggaggaggaagatcaatactgctatgaactactaagggacagaaagatttcctcccattggaaatctttaaagataaaacacactccctggtcctgtgctttgtaaggctgtaagtggaggaaatggatgaggattcactactcttttggtctcaggagtatttaaggaattgaaccacagctgcaatcactacactcaatgtggaatgttctgtgggttttaatttcttctgagtgaatcatttttatttctagatggtagatatttttaaccttgcttccctgtatggaccagtcagtcatggctgccggcctctgtccctaaccatcaggataggacctctggcttccacaaagtcagcccccagcatggggcactgacttctctaccctttgaactaggcctatgatcccgaggtagcctccaaaaaaaatctaaggtctgacattaattacctgcctttgcattttcctccttgttctgcttcaggattcaggtccgttcctctgaagaatgggtacagcgaggacatagagctggcttccctcctggttttctgtgagatgcggccagtcctggtgagtggagaaacaccagttaagggttccctgagctatgcctgctggtgagggtagaaacggcccgtgaatacaattggcagatggacttaagcccattcagaattgtctagcccaagcatgagacatcatacaagaattcctttttgctaattccccagagtgtcctgggttttccctcccagcatcctcctttcctggagaatgctgtgtgattctgtgtaggcagtgtaggaaagggtgccggtacttgtaagttccccatagtttcacttcagcaagagccaggccagatgatgccttcctagatagactcatcctttctggatgctttttggtgccagtgcatctttaggaatcctatcaaaaagtctgatagcctccaatcaagtagaatgaccataaattaatcaccccccaagctgagcatttagatggaatccatttacaaataaggcgatcatgcacagctttaggtgagtacctttttcctcctttacgccagaattctttccttaggatcaatactcagatatagaattagtgggatcaattaatttagctgaatggtaaaactgtaaaacctgggctttagcagaagccttaaaccagtgagcatgaagaccctttgcttagtgaagcagaccctttgcttagtgaagcttatccctccccagctcactgaagatctgggatttgtgcatctattgcccggggaaagggaaccagtgctgcttctctctatacataaaacccctccgcagacacttcacagaaaagtcaagtgataaaaatggttttagattgtggtagggcagcatttgcctaggcccgctgctctgcaaggctgttgtaaacaaccggaaacattrtaaataatttaagtgattaggtatcaccagcagcagagaaaattagtatatttaaaagaaaattgtgttgatgcagatttgacttccttgatgagggaagcttaatgccggggctgccactgtagggagccaggggcgttgtgtggggttctaaatggaaagtcgacgctcacaaatctgctttctgaaagttttctttagttcagctgctaggtcttgagatttcatttaattccacatctgtcacctggttctgtgccactcacaggtgcagctcggcatttctgtccacactgggatgaagagtcgctcttggaagccgagctgaattgcattcggtagacctgggctttctccttaatgcccacggtcataccttttatttatcaccatakcctctggaagccagggagaaactctggtaaacagcctcaakgcagacttttctgagcaaatgattgatccagtaagggctaagatggagtttactcataaaacctttgctgagatagagtttacagccccagaaaactgtcaataagcactttacacaccttctgaagaagccatttacatgtcacaattactttatcaagtcgcagtcctttactttgctagcagtatgtttgtttagtttataargagtatttttagcaccattttattacctactgtattttatttaagatgtaagaaaggtgggggagttgaaaagagtcccccagatagcctgtatctaacgaccgttaccatcttggtagatttccattgccttatgattttttgtatatgatatttccatagtcagattcatacaggtgcccttttctacttcacagacgactttaaatgattttcaaagccattgatgcctgtttcatcaggtatgggtccctaattcacttatkctcctactaacggagagtyaagtcgttggcagttctttactttataaataatataggtcttcatgtaatattttctgattaaaaattatttcccaaggctagatatttagcaatggaataataaatcaaagaaaaaaggaccatgtatttttatctgcatgtcaaattgttctctgcaagtaaatagtttctcctaagttgtcgtattatatcccatcttgccattaactggaataggcctccactggaatgatttaacatggtgagatcccgaagaatgggactggggaaaataggaaagcttaaatagtcatcatcttccatgggcaaactggccatttctggagggcacatttgagaaaactggctgccccacgacctgtttagtactgatcctgggtggactgggttctgttttgtgctgggtaggagctaacctgcaaggggtggagaggcccttctttagagtggaagaaaacccaggatgttgtgcactagattaaggcttatcctagagcagatgcttgaatccctttgtagaagattgcacactttagaatcctggaggtccaggactgggagctgcactctggcactgagctggtcctggtttttgaggttgggaaagatttccttacacctrgggagacctggagggacacaaaggccctccttatgcctcatcagctaaagttggtcagtttgcctaatgctggctccaaagagcaaaaactgctgtgtttaacatccatgacccaagagtgtgacatgactactgaacacacaaaaccatgagcatgcagtggaaaaagaggaagacagactaaggtacacacctggaayagatggctggcagttgaaactgagccagtggaaacctcagatgatgagaactgtaacacataactcataggatctttcaaagacatccaaggagagcactggagaaagctttctggaattcagagaatagacstgatttgttgcattaaaaaattcagtatataaagagatctgcattagtgacaccaaagataatgtgaaggaaaagtctcacaatctagggcaaccccaccatgagatggaaagaaaggaaaaggtgggctgggaggacagatgccaaggacctamtatgaaagcatgtcccaaaggacaaagttaaacagacggtggagagctattaatgaaatagcgaataaaggaagtgtttctctaatctgctgcttctgagggcccacttggttgcaggtgagatgaatagaaaacacatccataccctcagtaatatttcagtaaaaatgttaagttccaaggataaatttaaaaacctggacttccagcacactagttgtgtataaaggaaactgaataagtctaatatcagacttgycctctttggtgctgaaaactaaaagactcccaaagtgggtagaatgtggactaggaagacggaataattcagtgtccagcccccgacatgtcaaggaatttcaaggtatgcaatattttagatatatcatgtatcctactcaagggaaatcttgaggcagcccctgaatcgatgattattttagtcagaaaagaaaacttttagatagggaggtgaagagagggaaaccagtgaataattaattttgcagtacagttasatcttacaggatgatgacagtgtgataaaaattttgtcatggtaaatatcaaataaggatttttgaattggaagaaatataccatgataaaaaatgacaatcaaaagctaaaaaataatcaagtatcaacaaagcaaaggcatggaaaggtaaaataaaggtatgctaaaggttatttcaactttgacgactagggaatcagtcagtaaataaactatactgcagagggagatttaatgctacatctgatgttaaaggaaactgtgattttagttagcattgttagactgagggtaaccactgtcagaaytgaaaaacagacaagaaataaggaggaaaaaaggagatcaacataaacttgaccaagagagtaaaaataatgtaaagaatcagaataagttaaagcaaggtaaaatgtgtagtaattgaagtgaaatggataagaacttacatttaatttggtgaataggctgaatcctcctattagaaaagaaatctacctgcagtgtttacaacaagaggcctaaaggcaaggtaaataaaacaaataggaatggatggaagagttactgggaaaattgggaaggaaaagttaacatcaatctagaatttacgatcagaagtactacagtgtattaagacgaacaatatgtgatgataaaatgcttgttttctaaagggatataaaagtcattagcaaatagcatagtacctaagtatataagacaaaaattcctacatatacaaagacaactgtataaagaraaaatctttcagaatttggaaagtcttgtatataagaaatcagcaaagacataatatcaaaataatttgccttaagaaatatacaactttgtgtcctacaaatggataacatacactattttcttctgtctcaaacttcataaatttgattgcattcgttagaaaactttaatacattttttaaaaataatgatttcctaagtcattggctgtaactggactagattcaaaagacacaaaaagatggcaaaattgctcacaatttgaagataataattttctaaatatactaaaacaagtaaattacttagaaagtaaaacatttatgccatagttacatttagaagaggaaagtgcttgccttaaaacttcacraagaatgaagacgtatgtactactaagtattcatcttcagaacttttaaaacaccaataaaatagaacaaaggaataaaagagatagaaaccaactgaataaaacacaaataaaaataaaaggataaaaagaataaaacattctggtttatcaaaaaggccaaattttgttttgagacagtgtttttttctgtcacccagcctggaatacagtggtgtgatcatggctcactgcagccttgacctcctgggctcaagtgatcttcctgagtagctgggactacaggcatatgccaccatgcctggctaatttaaaatttgtgtgtgtgtgtggagacagggccctgctttgctgcctaggctgctctcagatcctcctgccttagcctccccaagtgctggaattacacgtgtcagccactgtgtccagccctcaaaagaccagttaaactctttgcctacttaataaaagaataaagaggaaaaacatgtaagagtaaatactggaaaggagactgaaccccaaataataaactacagcaaatggatgattaccttaaagaatgtaaataggctaaaattgttctgaaaagcagtagaaaagttaaaacacctattagataaaacaggtttaggatctagatggttttatagcttagttttgtcttcatttaaataacgtaattccaatttcactccaccaaagtaagaagaacaatggaaatccttcttctgtcttgaagctatacaactttcatatcaaaactggagaaagatagtactcctagctttcccctaacctcattcagccgtagaccaatgtcatgtgtgaatatagatgttaaacttcaaaaaatagcaaatatccagctgtttactagaagagcaatatattacaactaagcatttattctggaatgcaaggatggtttaacaccagcacagttagcaacaaattaaatatgaaaaaagcataaactagtagatgccataaatgtaaacagccaaatgaaataatcagtataattttagaaaaaaggtcgagtgatctctattgtatacaaatttaaactgtacaaattctgattgtatagtttacaaaacaggaagacttcaattttaaagagactgatgtttatttttcttgtatttattgaaygtaaccacttctgtctgttctagaagtaacaaacagaaatgtggtgtgggaggaagggacaaatgggacatcccatttgtgatactgacaaaaaccataacacatttaggagtaatttaaataaaggtacagaacttatataagaaaaaaacataaaatcttattaaaaaacaaaacaccatgtgaacaagtagaaatttataccaacccttccaaaattaatgttggattggaattggaggtatcaatataaactcaagttacatatatatttatatatatatattcacrcgtagatgaataaatgtgtgtgtttacatgttactacaaatacatacatatcctagctcactctgctgagtgcctagaacttatgacaccccagtcattggattctcaattccagatattgctaaatatcatatgccaataaaaagaaatcagggctccttagacaagtggttgatttccagacatgggataaataaaatataaaaaggacctggagcatcttaacatttcagtaaataaagaagtgctgaaaaaatggtggaagcacatcaaaggggcctaggaaccaaccagggagcgctcccaatggccacagctggaaccatttgcatagcaaaataatgataatatcagattctagcacacagaatgaaatagccacatgtctgtgaatgaatgaatacatgacagagaagagatagctcttccttacaaatgaattctgattaataaatgtagaaggaatgagggaactagaaaatcactattgaaacagcatagtactaactgctgcagtaagacctactgatgaatgcaaaatgaaagttggaggagaaatatatttccattgtcccaaaagtgtcttccgccaagaaatttatcaattagaaagamaaaaatagcagctttacagcggatagaccctgcaggtaccatcttaatcagatgatcaacgttaccaaccacctggaataasgcaggttgaaatcacgtacttcctgaggtgagacgctgagaagggtacattgcttctgtgacattcttgccaaaactgcatcgcctcaaacaaattataagaagacaccagacaaaagttgctggacattcatacaaaataactgactagtattcttccaaagtgtcctgagggaggaatgaggaaaccatacagattgtaggagactaaggcagcacaatgactaaaggttctgtgggatcccggattggatgtgggaacaggaaaaggagactggtggaaaacccagtgaaatatgaataagatctgtagktttagtattgcaccgatattaatttcttagttttgatacttgtactgtggttgtgcgagatgttaacactgtggagtctaggtggttggggtatgtgagaacattgtactattactgtaccttttttgtaagcttaagcttccaacataaaacaatttaaaaggtattggtgggggaaaaactttatttttttgtgtatttttccccccaacaaacaggagaaaaactaaaggcagagagtgccataaagattttgtctcaggccaggtaaaacttattaccaaaagcttcattttctaataaaacaaactaaatttttaagtgaaaactyagactcaaaagaaatccaggaaataagtatcacaaaatgctttctcttgactagagtggtggttcctcaagtcaagagggctggttcatttgctgtagagttattcactaaactgtttctatcttttacgttcttttctgaatgtgcattatatctcatatatatacagtgtacccaggactacagtatgtaatatagctgcaaatattttggcactcaggaaaggtgataaagggttgcagttatagaagcattcatagaaaaggtgaattttgaacttgcgcccgaataacaaatacccattatatagaataaaacaacagaagccattttcttctaggtgcagaaaagggaaagagagacctttcatggtatagtattaagacttaaatggggttttcattttgctttattttttgagacagggtctcattgtcttgcccaggctggagtacagtggcatgatcgtggctcactgcagccttaacctcctgggctcatgtgatcttaccctctcagcctcctgaatagctgggagtacagggtatgccaccatgcctggctaatttctttcattttttatagtaacagggtcccgctatgttgcccaggctggtcttgaactcctggtcaagcaatcctcccacctcagcctcccaaagtgctggggattacatgcctgaggcactgcgcccggcgacttgattcttttcttttctttttccttttctctgaactttattctgtaaaattttactttaagttccaggatacaagtgcaggacgtgtaggtttgttacataggtatacgtgtgccatggtggtttgctgtactcgtcaacctgtcatctaggttttaagtcccacatgcattccccatccgccaactagccatggtgtgtgttgttgccctccctgtgtcctcattgttcaactcccacttatgagtgagaacatatggtatttggttttccattcctgtgttagtttgctggctgaggatgatggcttccagcttcatccatgtccctgcaaaggacattacttcattcatttttgtggctgcatagtattccatggtgtatatgtaccacattttctttatctagtctatcactgatgggcatttgggttggttccatgtctttgctgttgtacatggtgctgcagtaaacttacatgtgcgtgggtctttatagtagaatgatttatattcctttgggtacatacccagtaatgggattgctgggtcaaatggtattgctggttctagatccttgaggaaccaccatactgtcttccacaatggttgaactaattttcattcccaccgacagtgtaaaagtgttcctatttctccacagcctcgccagcatctattgtttcctgactttttaatatgctttattcttaatagggaggaaagtcattactaagtgaagtcattactgactcttcccaatgcctcacttgatacattcacttaatcaccaaggacagcccattttacctctgcttactcttcaacctttgcaaacagctggaataatcatcttctgtcccccttctccaaagtcacagttccagctgttaccctggggactgttttgttaggtcattaaaggaggaaaaaaccttgcagagtatggtctgagtccgtgttttyctaaaagtaaatgacaaaggatcttgtttgtgcacctcaacagatgtttttgtagcacaggagtctttcacttgaactccatcgggaaaggccaattgacttgaccctcctgcaaagccaagcttcacagagtagtcagggatcctctgaaacagatgaggcaaaacatcctcatcctccccctgcattgaaacccaaactccctaccctgagtggcttttgtctttttttctcccctagcrtaatggactattttggttcctgcaactgaaaagtttaggggtaggtcttgtttcagtcatggctgaatctctgtgctcactcagtggctgttttcctctttttctggcacattccaaacttcttgactcaatagcaacgtggccatgacaggaccacacttactctttcagctgatcccaagaaaagaaactctaccaagagcaccaacgaaagtcccacggatgcgtctagttggccttgcttggstcatgtgcctggaggttgtactggtgggggaagtagaaatcattactggctacaggtgaggcacatgcccatctctgcaagatgtaatttatgataccttggcttttttgggtaacagctttgagagataattcatataaccacatatcatataatcactcatttaaagtgtacaattcaatggtttatagcctattacgtgttgtacagtcatggccacaatcaattttagaacatttccaacacccaaaaagaaacctcacgctcattagctgctgccactcactccatcccccagaccccggtgacctttaacctactttgtctctgtgattttgctagttctggacacttcatataaatggcatcgtgtgatttgtgatcttttagagttgggctcattcacttagcataatgttttcaaggttcatccaccttgcagcttgttaccttgccttttaaggcccttaaaagattttaaattatctgcctcctgcctgccttttagttctcatgtcrtgctgtttttttctcctctgctgggttccactttaagcgtgcagctgcttagacacttttgcagtcaggtaaaggccagaaggtgacatgtagaccaaaggaaaaccgggttagattaagaaataggatctacaggaaatgcagtcattatttcaatgttttgcaataaatcaacagtgtaaagaccaagcactttttaaactgcttgcttcccacacaataaataattgtgttttatctttctttggttaaaataggccctggctcttctgggctaatccaagttgcaaaacttctgccccatgctccctttgggcatgcttgtgagatgccaggttcacattttggtttggaaggtgtagtcaccacatggttgttctctcccctgcatcctccaggagagcgaagaggaactttactcctcctgtcgccagctgaggaggcggcaagaagaactgaacaaccagctctttctgtatgacacacaccagaacttgcgcaatgccaaccgggatgccctggttaaagagttcagtgttaatgagaaccagctccagctgtaccaggagaaatgcaacaagaggtaggtcagcccctccacctgcaaaaacttttggggggtctctaggcacggtgatgatgggcaccacgggccaggcttctggaaagccctctgagttgctttcttcagaaatccttggccgggcatggtggctcacaggccaggcatggtggctcatgcctgtaatcccagcactttgggaggctgaggaggttggatcacctgaggtcaggagttcaagaccagcgtgcccaacatggagaaaccctgtctctactaaaaatacaaaaattagctgggcatggtcgtgggcgcctgtaatcccagctacttgggaggctgaggcaggagaatcatttcaacctgggaggcagaggttgcagtgagccgagatcacaccattgcactccagcctgggcaccagagggagactctgtcaaacaaacaaacaaacaaacaaacaaaaaatcctttggcacccttgactctagttctctttgttctagaaattaacctacagtaataccttaggcgcttgccacttcccctaagtagaactgtttcctctagaaggacacttcaatttaatagcgaaaataaatgatgaccactgacttttaaggagtacttattgtgtttccaagaatgggctagtccagcggctctagactgggtcaagatcccccaacagggatgcttgtggttgtgctacaggcatgtaatggggtgcggggcggccggggttgccaagtgtttcataatatgtctaaatcttctaagaaagaatcatccagacaaaaatcctaatagtagccaccaacgagaaactgtgctgcctcccttactcacattattctcattgaatcttcatgtcagcctgcagagtagctcttactctgttttaccattgaggagatttaacctctctgagtctcaacgtcttaccaggaacttggagtctgcctctctgacactcagccctataccatccagctatgaatgactggcaaatgtacagaaagagaaatgttacagagttcagcacgcagcccatttctcatggcccactgctgatggtgaaatctgttttatttcaggttaagagagaagagagtcagcaacagcaagttttactcatagaagctggggtatgtgtgtaagggtattgtgtgtgtgcgcatgtgtgtttgcatgtaggagaacgtgccctattcacactctgggaagacgctaatctgtgacatcttttyttcaagcctgccatcaaggacatttcttaagacccaactggcatgagttggggtaatttcctattattttcatcttggacaactttcttaacttatattctttatagaggattccccaaaatgtgctcctcatttttggcctctcatgttscaaacctcattgaataaaagcaatgaaaaccttgatcaattaagccttctgttgcacgacctgtgcagtgaacaggatttcttttctggccaagaagattctacctctaatgatccaggtaactgatgtccatggaggatgagctggaaatgtaagaaactattcatgagattctgaaaaggattttaactcaaaggcaaatgattccataagggcccaaagagaagccctacccacaggcagcctgctcagttcaatgtactttaactaccaccggctgcctgctgcagtccacaagaaaatggctgagtgatgggatctgttcattaagacaatttctaattaatggtgacagcttgttttgtgactagagttactgggatggagggtaggaatcttggggcctctttgttttaaaaagcccatcagagagaccagagccgtgctgcaggggcaggttctcacttgcccctggctctgccagctgctgggaggctctggccccactagtccctcatggccctactgaactggctgggaggctgctggaatggcccttggtccacagctctccacaggcaagaggtcaactgctgcttgaaagaggtagacaaaagttaggttgatggcgaaatgtctctgggttacccagtcttctggagcagcaagctgagctttaatgggctaagcattagggtgttacagaaaatttcaaatgcagccatctcccttggggcagatctacctagttcatgacagtatgtgcggctggccagggctttacacctctgcatcttaagttgttaatacataccaataatgtaatatggctttttaaaggagaggagagtgctgggttgggaagggaggtggttggtagagtcacaacttctcaatgagtgaatttacagctgatgggaaaaggagtgtaactgtgaaaaacgatggctgtggtggggaagaacaaaccagcagtaagcctgatgtttgatgtggatggaactggcccctagaaacccatctgaccctcctcttgttacccgaaatgctgggcttagtatgcatgtactgctgaaaagcagggcagaacaaatcaggctctgaccagaagatccttctggtcccttcactctacaaaaacttactgatcacctccacatgccaaatacagtgccaagatttgggggtgtggatgtttaaacaaaaagctgtgggtctcatcaatcatctccatccacaagctcctaaaagaaagccatttacctcgcttgaagccaggaacacagggaacagcagtctggccaaggaagggctgttatctggtgctatcactccagttactcctccaactgggagctgctattttatttggcagtcagcaactgaagaaagaacattcctcttagtggcagatgttcaaagcaactttcaagaaaggctaggtgagaaaggcactgggatgagtgctgcaggcactctgtagccagggccccattagcctttggccaggtagccaccagaacctatttattgcacctggcatctcccccaacccctctcagctctgttaggacttccacacagcagagctcaggtgttgctgtcrttacctcctttcagctcctcacttcattctactttaaagccacagtgctaaggcctgcatcccctttctgcccaaatgggttttttgctaccatatcaaagaacctgacatatggcggcataggaagcagaagctaagcctctctccagctgctgctgtgtaaaatccatgcgtggccaaagagaagtcaggggattatgacataaatggtgctgggaagaaccctctgcctaaaactgtctccttctcctggtgctacaaccggaatccaccatgagagagtactttcttcggttctttcctcctgtccttgacagagtaacacgttaatctggttcttggtggtgttagggactgattctctcaggaaaggcacacatggtatgatggctcttcccagagtctatgtgatgctacataacttcagtatctagctgagacatgcttcctacatgactgttaaagcacagccaatccaggccaagaagactagtaacaggcacgttctgaaagatggaagcagcactgatagatcaaaaccaccactgcatatgtattacactgtttttgttcaccattttcctaagtgtgttatttagaatattggttattacaaggaaaaataaagtggggaggctggttaggccttgtgagtttgggaaacttaggttataaaaactaaataaagtttttctactgtgagactagatgtgcaggagtgaaaggtgtagagggtcttgttttccaaattcgatctcagaatctttttgccagaagtgtctcatgggacttatctatagtggaacacatttgaagacctactgctctattaagaaggcagccggacaacatgttctaatacttcgtatgctttgtgacctagttaaaatctaaacttaagtcgccatggccagtggcctttagattaagctagccttacccctgggagtataccagagctttccaaggaatacacagactccagtactctcaggggagcagtgttcagagcctcatcttcctgttatattcttctctaagattcatctgcctgagaaaatgcccttttctcaccttacaaaagaaaatatggctgtctccacctctagtcttactgtagagcatgtcccaaggtgtaaaaattcaaaatgtggatatttggaaagtgaaagacttatcaacagggcacaaatctttttgcaaatggattttccaagtttttctggtggttccaaattttttgctttcaacaaagtgggaggaacagcctgtagatttctgagtctcttagcatgtaactacaaaggggttggaagaattcagtgattctgctatcataaagcttccgttcccattgatgtatctgtgtgaacaaggatcaacatctccataaatgaaattgaaaacggaaaatagaattgatgatgaactttggctcaatcttaagatgttatcaatctacatagatgaaataattgtggagaaaagccctctttatctcattaagtgatacatttccaaagaagttttactatgtttaataatttagtgaaatttgggctatgtgtttattgattcagctcaatccagaggaaaattttaaaggcttacagccttaggattataggatactatataatacttttggtacagagatagaattaaataacataaaaatcaaaaatttattaggctaaaattttgagggagaagtggtatgaaaatacaaattcaaggagtaaaaggaaaagtggggcattccttgctactaaaaattgccttgttccaggtaagactgatcataaaaaaatggccctgttcataaaatttttaaaaagatcatagtatctatcaaataacttatattaagaacctcctgggctaaatttaaaaagtaatacaacagttttatttaaacatgtagtgtctacggtatgccagcactttgcagctatttataatgagaaattttagatgtcaatatagcaatgtgcaagaagatagagattttcaaaattcacttaagagtatctgagcataaaatgttaagattgctgatcggatgtgagggcgatctggctgcgacatctgtcaccccattgatcgccagggttgattcggctgatctggctggctaggtgggtgtccccttcctacctcaccgctccatgtgcgtccctcccgaagctgcgcgctccgtcgaagaggacgaccaaccccgatagaggaggaccggtcttcggtcaagggtatacgagtagctgcgctcccctgctggaacctccaaacaagctctcaagattgctgatctagggccactaagtgatgaattgtatttggaagcaaaaaggatggctaaaaaggacctcaacccttttgactttaaaaggaaaatagcttaaccttcaacctgtgtgacatttaactttttgaacccaaccgtaaaagctatcttctaaccaacaaaaagttaataattagatttggaattatacagaattagaaaattggcatttaaaaatactcaataatttgtccctggtttttaattttcaaaatattttctttttgaagagccagattccagtgatcctgcctctcagaaatttccacatttcttatttttcattaggccttaagaagctgcatttgtaaacttgtgtttcattattaaagcttaatttattttttatataaatagtatgtgctttgtgtacatagagaattaagtgaatgagtcacacagatgttggctgttgttaatgtgaaaattaaacagctgtatcacattttgaaaaataaaagtttcatctgaatgaatatagcaatctgcccagaactttttttaaaaactgctattcaccttttatattcccaaataaaacacacacacacatacaataatttagtcatgagataggtagagttacagttattttttgaaatgtgttttactatcctatttatcccacgtttctttgggttacaggtttatcttcagcaaaaactcactctgtgttgaaactcaagtttgtacgattaatacttgagtgctcttcaatttatcagttttgaaagaatgtttagtgttggaaggagcgaggaccttatagtaagtccctgtatttctcagctgagtgataggctccctagaactgtcaatcactgcgtttcttgccaacaatccctggtccacaggaagccatgttgtatctcatacctctgacccccaacccccagcccccagtggttggattagttaccctggtccaaagatttaataatagcctatgacaaacctctgcattagaagatgagcaaggaatagtaaaaagcaaagatgaaattagaactgccaaatgaccactttttaaatggatacaaccataactctcataaagatatataatgaacatatgtcagaaatcttattaattaacaaaggaaccagtgagatgttccagcttgtttaaaggagaatgcagagaacaatatatatacatacagtataggttatccgctatccagattatctgattttatacggtttctccacgttttattgtccgaataatgcaaattattcctgtccgtagaaatgcaaactgtgtcctgtggagattccattgatcattcccttgtggatactgatcactggttttaccagttttatatctattaaatttatttcagcatcgctgatggatgtgaaatctgactcctatcttactccacacacaaaaatcaagtcagttagattatagatcaaaatatgaaagataaaacaatatttctagaaggtcttcacaacatcggcgtagggaaaggttacttaaacaaaactacaaaagcagcatccctgaaggaagactgctaaatttgactcccctaaaattcaaaactggtttttatcaaaagatacaataagaagacagagagaaaagacaagccacagagtagagggagatatttgcaataatgtatctgacaaaagacctcagccaaaaaataactccatcattccaagtcaataagagtaagacaatccatttgagaaaaaggggcatattccggcgtggtggcgggcacctgtagtcccagctactcgggaggctgaggcaggagaatggcgtgaacccaggaggcggagcttgcagtgagtcaagattgcgccactgcactccagcttgggtgacagagccagactccgtctcaaaaaaaaaaaaaaaaaaaaaaaaaaaaaaggggcatatttcatgaataagcacctcacaagagtatatccaaaggcctgataatgtgtaggaaaaagttcactcatgattcctatgggaaaaatgaaaattagaaccatgagataccactacacacttactagagtggcaaaaattaaaagcctaatgtgttagcaagaatgtagagcacctggcacacttgtgtaaattagtacaaaactacattgtaaaaaatgtatgacattctctgctgaaattaaacatatacacaccctgcaacccatcaattccactcctgaatatatacctaatactgaagcatatatatgcacac

SEQ ID NO: 95828 - DNA, 45881 bp, Homo sapiens
tggtcttgtgctggttaagagtttgtaagtgctcaatgtcttatgatgaaggcatgaatataagccaccatgcaatttttcttccttttttaaaatcagtgagcagtcttttcttcccacacccccaccccacctactgcctgtttgagtcagtgttcatgaaccttcctctcacagattctactgtcttgatcacccacgaaacagtttccctacgctgcaagaaacaataagggaacttgcaaacaaatacttctgcctgatgacaattgtatatgaattgaaataggacctctattaaaggtgactgatataccattttccaaactgaactactctattctttttctgcaaagcattagtttgtagaaaaactctgttgctctccagaaagtcaagttgaaaggtttagagattgacataaacatcctgtgctttctctaagtgttcacttacggatcatgaatctatggcaaccattctcaaacaggtgtttatattcagcctgcaccgactgatttattcccttgacaagtattttttgagagcatatatgtagcagtccctgcacttgggcccaggatacagaggtaaccaagacagagaagatccctgactctgagaagatcaggcacatatgtcctaagttattgcctatagggtaaatagtacttaggtctctgccattacaagaccaaagtagaaaacctggaatatttgggggtgggtaatgaggaagcagcaaggggcagtaaaatattgtttgggggagtaagagtttctcatacaatgggactcctctaatgcctccaacatagcattcattcttatttgcttgtcccctgtaagataatgcaaaggcacttgcactttgagtcccagaaggagcagagactggaaaaaaacaaggagaagagtgcggcctgacaaagaaccaaaaaaagactaattagctaagagttctggtctgggcgtggtggctcatgtctgtaatctcagcattttgggaggctgaggtgggtggatcacctgaggtcatgagttcgagaccagcctgaccaacatggtgaaatcccgtctatactaaaaaatacaaaaattagccgagtgtggtgatgagcgcctgtagtcccagctactcagaaggctgaggcaggagaattgcttgaacccgagaggcggagcttgcagtgagctgtgatcgcaccactgcactccagcctgggcaacaaagcgagagactctgtctcaaaaaagaaaaaaaaagaaaaaaggaaagaaaaaagagttctgggccagacatggtggctcacacctgtaagtccagcattttgggaggcagaggcaggagaatttctcgaggccacgagcttgagaccagcctgcacaacatagccagacccagtctctacaaaaaaattaaaaattacccaggcatggtggaggctgagtggggagaagttggaaactacattgaattatgattgcaccactgcacttcagtctggggcaacagagcaagaccctgtctcttaaaaaaaaaaaaaaaaaagagttatggctagcactgctcagcttagtgaagctatctggccactgtcatcatttattcagtaccatggacctggaccagcatctttttgctgagttttgagtgtattatataattcctgatcagcactgttagagctttgaatacctcttgagcagtctattgaaatttgtgaactgaatacatatttcacattttgaataggtaaaacattcacgtggttcgtaattcaaaaagtataagagtacacagtaaaaagcctcccttttacatttgttctctagctgctcaatatcccacctctgaaggaatccagttagtttgttaaaaaaatgttttgtgggtacatagtaggtatatatatttatgaggtacatgatcagtcagttttttagatatcctattttatccatattttatgggtatagtaagtaggatttttaaaaataagttttggccaggaatggtggctcatgcttgtaatccagcacttcaggaggctgaggtgggaggggtcgcttaagcccaggagttcgagaccatcctaggcaacatggtgaaaccctgtttctaaaaaatttaaaaattagccgggcatggtggtgtgcatctgtagtcccagcttctcaggaggctgaggcccacttgagcccaggaggttgaggctgaggctgcagtaagccatgtttgcaccactgcactccagactgggcaacaagtgagaccttgcctcaaaacattttattttattttatttattttttgaggcctagtttagctcttgttgtccaggctggagtgcaatggtgccatctcggctaactgcaaactctgcctcccaggtttaagcgattctcctgtctcagtctcccaagtagctgagattacatgcatgcaccaccacacccagctaattttgtatttttagtagagacagggtttcaccgtgttggtcaggctggtctccaactcctgaccttgagtgatccacctgcctcagcctcccaaagtgctggagttataggggtgagctactgtgcgtggccaaataaaattattttattgtttatattgaaggtatacaacatgatgttatggaatatgtcgtatcaatagtaaataggttactattgtgaagcaaattaacatatccatcgtctcacatagttacctatgtttttgtgacaacagtagctaaaatctacttatttagcatgaatctcatacatagcgtaaacttattacctatagctctcatatacattagctctctaggcttgttctcatgtacattaactctctagacttgtcctaaatatctgctactttgtaccctctgatctacatctctgattctccatcactccaccccacaacctgctccaggtaaccactgttttgttgtctatctctgtattagagtaaataggattcttaactagccctctaatttgagaaccgtatctcagccctgtgacaacctgttcttctagagtatatcctgttccacaggatttatatgaatcggaagttcagattttcgtttccagatgagtttagtgcgagctgtcctcaagaggggaagaaaacagaaaaaacaatttggagagacaggaaaaatgtatatgttaaagtgttaatactctcagagaattttatgccatcaaagcaatctctaccaaacaaggttatactatcaagttttaaaaatctggtttcctaaagaaaactacacatggttctatcaaattacaaaaaataagtgattgctaagtgctgtgtactgttctaagtaccttatacaaattacatcatttaaacttcccaacaaccacatgaaggtaagtatatttaataggtgaagaaaacaaaggacagagaaattaagcaaagtgtgttttcaaaccccgactgggggctccagagctctcactcttaacctaaatgatacttattgtctgttctaatagaagatagacaaaaggaggccaggtggagtgactcacacctgtaatcccagaattttggaaggccgaggcaggaggatcacttgaggccaggaattgaagaccagcttagccaacatggtgaaactccatctctactaaaaatacaaaaattagcagggggcagtggcacacgcctgtaatctcagctactctggaggctgaggcagaagaactgcttgaatctcagagggagaggttgcagtgagccgagatcatgtcactgcactccagcttgggtgacagtgagagactctgtctcaaaaacataaaaaaaaaaagcacctggcacctctttttgttttgcttattgttttttttgttctcgtttgttcagaattttttgtcttcaagtgttagtatccatcaaaattacccctgatgtttaaatgcagattcccaggtctcagcactgacctagagaattagaatccctgggggaagggctccagctgcaggaatgctttttttaaaacaaaacaaaacaaaacaaaaaacagtgccctagatgattccaaggcgggtggctggtaagcatactctgacaaatattgtacatgtggcagtttctttcccaaaattggccacaaccatactttccatcacatatatgctgctagttcctagagtcttgcagctcccctttcaagaggtggtgtccatgttccctgccccttgagacagggtgagttttgtggctgattgactgatggattatggttattgtgatgccatttgacttccacgaggccatgtgatttccacggctgggtcaaaaaaggcgatttagtgtccatttcagcttgctagaacacttactcttggagcccagccaccatgcaatggggaagcccaagatgccccagggagaggcccacttggagtgaaactaacagccagcaccaacttgcccgccttgtgaaccatcatggaagccaatcttctggttgcacaggctgatgcagcacaagcagagtgtgccttcctgccaagccctgcccagactgcagacctacacactcccaacacaatagcactctgcctttctgcctaccagcatgaattatcctgggtcctctataaaatattctgaaaagtatctttgtccagtttcatttacttttgcagattcttctagtcacagaaccacctattgcagacttctggttatttgaaattctcattattacctctgaaccttggcttctcatctaaaacgttctgttaataatagagactacttcatctgtttcataattgaatgatgtattaaatttattaaccatttagcatcgtgccagcacaaaatatttcttattgttcttagtaggtttcttgtattcagagttccagtttctttagtgcactattttttctctctcatagctcaatgccatttcacaggccatttcctatgcttggcatactcttccctacaaggtcaggtaggttcttactcatcattgaggacttcacttatttaagaaggcttccctgagttctcaagcagttaatgcctctctgctaaaatagcaccttggaggaacctgtattacagacagcccttaacacattggattgtaactaattgtttactggtctctcttctccattggaatctaagttcctggaaggcacggtcagtcttgtcttcatttattcaccatctactgtctgttagtgtgctaggaaacactgtggttaagtagttaagggccaggtcttggcggatctgcctggggacaaaacagctccttggaaaaggttaactatctaagcctcatttgtaaaatggaaacaacacctcctcacgattgctgtgaagatgaagtaaagtgcttgcaaacagtccatcacacagcaaaccatccgtcatcaggataaaacgcttccccaacaattcaattttcgggcacccccactctaattctctcataggacctcgcactctataggtaatctctgctttacggattactctgggttctttaaacctctccttggtcattcgtcctgttaacaattctgagtctcaacctttaggtctaggcgttcagaaccattcttcccgcctccaactcgctccaaacccttttccttcagcctaccctgggcctaggggcgtgtcagaggtccgatttatacaatttaaacatcaaaactcccccaacagcgtgtgagtaactggagagacccccagtcagagctttgccaccgagtttcggtcttgccctccctttgaggaaggagcaagacgatgagccccacctcagtcgttcactgcagagccagcagggaacgcgcgcaatgcaggctgagctgaaagaacgaacgcgtgagctgaaagaacgaacgcgtgaatgaatgaatgggatacgtcgtaggccaggcctctgttacgtcgtccaccggcgcgggcgtggccacggttaagagagacgcgcgcgcagtcgcgcgcgggtcgtgccgtaccaccgtcgcgggcaggctcggccacgagcgccagagccccgcgcctcccctcgcggcctgtcccaagtccctgccccgcaacagagcgtcacttccgccatccccggcagcggttggggcggggcgcacgggggagggggccaggtcggagggaagcccgcccgtgcccgagcccgcgcccgagcagggactacatttcccgaggggcctcggcggcggctgcggcgacgggcgcggcaacgtcccccggaagtggagcccgggacttccactcgtgcgtgaggcgagaggagccggagacgagaccagaggccgaactcgggttctgacaagatggccgggctgccccgcaggatcatcaaggtaaccgcccaggccggcctccagctcttcgctctgctctcgtcggctcagctgggcaggcagcgcggcctctcgcctccttcggcccgcggcccgctctgggaggcccgaggcggcgcggagaggggttggccgcggcggcgagggaagtcgggtgctgaggagggggcgccggggagacttccggccgcggcggggcagccggacagcggggacccggggcttccaggcggctgcccggcgggccagggagtgctgtcccacgccccggcggagggtggggcggcaaggctgggggtctctgggcttgggcgcgggcctccatagcttctgagaccacccccccgccggaggccgcgggcgcgcgggaatcgcggcggggctcgggcgcctggtggggattgtggcccgacaaggtccctcggcagccaagcccctcttctccgccccgacggggccgcggaggtgcggcaaccgcgggtgcagaatgaatgaaccgggagggtcaggccgggcggggccctgcgccccgggaagtggctctgggaggcccgcgcgtcctgccgcggtcagcacatgctcgcccctggttgccgcggctgcctgggtcccgggacgtgggggccccgcgccccgctgcccttgcttccgcgatctctctcttctgaatacgtttccgctcgtttatctctgcgaagtgattttactctggttggcaaactctttcagagctgttccgaggaaatagttttaacacaaggctgggggagggccgcagttatgggggattctctttctctctcctcttctctcctctcctytctttttcgtagatatgaggcctcgctatagtgcccaggcggcttccaaaactcctggcttcagagatcttcctaccttggcctctgtgggggatctcgtgaaatcttttgcccctcaattttgtgcgttttaattattaattggctgtttatgaatactgtgttttgacaagtatgtatggaaccatgacattttcgattctttgattttgtaaagtcttaaggaaatatcgacaagtcttcagacgtgagatattccttgtcatcacaacaactaaaccttaaatttttgtgtcggtttttatgaaggaaattagttgcacatttatgtgactaaatgcgccagttaaagtgactcaattgcagcatcattttgcttgatataacctggtgaacgtgtatgttaatcttgctcattcttgtgaaatctrtggggagatgcatactaagtggaagacctgttaggcttcgaggatgatgtactgtatactgcttcatccaattgcatttaaatatatctgagatgagggagatgtcactgacctaagggtgctgatgtagagaaataagacgtttttgtatggtagaaattcttagaaatgagagaagtagaacagattgtcagggagcactggagtctaataatgtgaatcttcatagtccgaaatttgttgtgtgtggatttatctaggattctgtccaaggagttttaattgtcatatgtattggcaggtccgtacaacgtggttttagttataatgcagtcacatggtccccaaaggtcatgtttattgaggccccagttgaaaaatgaatagggagtgatagagccatacatcaaatatccttgttttcgttgttacttaggttattgactaagtacataatgcaagttgacattcatgataattctctgaaatacatagtgaactaaacatttaacacgcatttttctatttttgattatgaagatatgcccagtaatatgaaagccttggatgaaaaaataaattctgtggaaccttgtttataaatttacagaaatggtttaaggcaataagttgaagtcctcatgattcaatccatttggcacacagtaatttacactgggcatttacattttgctgttgaaactaagacagtagtaactcatactgtgatatataatcttaattttacggtatcttgttgacarcatctatctaatgaatgacaccttgatttgggttttatcttactagtttagtgtcatttatagcttaaaaggatggttttctctaatccttaaacagaagactaaaagactagatttttaaaagtgtccatgcttgtgttatgtaggttgttccataatcagtgacaatgctttaaaaaaaatcagaatttatttttaaaagttgcctcttttctgtcaatcactatacaaacttctgtgtggtggatgggggtaacggtattgtcctgaggcaatagggacatgactttgttgattggactgttaatttgttttatttctgggtgatctttgactttcttcttttctttctgttttcttttcttgagactcgtctcactccgctcccaggctgcagtgcagtggcaggatcatggcttaccacagccttgatctcctggtcttagatgatcctcccacttaagcctcttcaatagctgggactgcaaggtgcatgccaccacacccagctaatttttgtagggacggggtttcgccatgttgcccaggctggtctcaaactcttgacctcacacaatccacccatttcagcctcccacagtgctgggatcacaggcgtgagccactgtgccccgcctgacctttgactttcaaaggatgaaatttagtgttgatataacatcagtgttagcattctcatctaatgaaaatgttaaaataaggtggcttgatttgcatgactgttaatatgatgctttctaacttataatgatcactatttacatttgtagatttcttaaccatttgattcttacagacatttttgtgaactagacaatatattttgcagtctagaaactgacttaaatgactttcctaaggtaaagctggtaagaggcagaatttggatcttgattagtgtaacattcccctgtctcttgttactgtaaaatgactaactacaaatacaagatgattttctggactactattcacccagttgctatctcatttagattcctgtatctaatccagtagcaaattctgtaggttctgctttcaatatatgtactaaatcagacactttcccccctgtctttcaaacctctgttcacttccatcatttactgcctggcctcctgtattagcctactttggagcagcagctagtgttatcttcttaaaatatagaccatgttactcccctgctaaaaactgtagaggttctccatcacacttacattagaatcttgccttcccccccaccccttagctataaggccctgcattcatttgggatgcctacttctgagcgcatctgcacttctctctctgggtcactccactgtagccacactgttgctttgctgtaccctgaacaataagtggttgagcttattccagtcacaggactttcctccagtttgttgcattgcttgctttgtccagttgttccgttcttagctcatatgtcataccctctacctaacctgtcccgtataaaccagtttccctttttcctcccccacaattttatcctcctatctccctttcttctgtataagtgcttattactgttcgaagttatgttatttactgtttatttctctctattccccattaaaccttcatgaagttagggactcttggatatcccgggcattgctcattcgtgcctagaccaatccttggcacatagtagatactgaaatattaatagactaactgaatagatgagccttaatctcaatgagcaataatttgacattgttactccttggtatattctgtctgaaccaatgtctgagctaaaagttaaagctagtctcgttttccacccataagctcacttaaaaaggacatcaatcttttacattatttcttttttgtgtgcctactctgcttatgtatctttttttattaactaggaaatgcacacatagagcacatttgaaaggctctgaaggatacgtagagaatccctcatctgtccttcagcattccagttcccctgcttagaaaaccactgtttttgtttgtttgtttgtttgttgagacggagtctccccctgttgcccaggctggagtgcagtggtgcaattttggctcactgcaaactccacctcccaggttcaagtgattctcctgcctcagtctcttaagtagctgagactgcaggcatgtgccaccacacctggctaatttttagtagagatggggtttcaccatgttggccatgctggtctcaaactcctcttctcaagtgatccacctgcctcagcctcccaaagtgctaggattacaggtgtgagccactgcacccgacttcaaccactatttttattgtgtatccttacaagaagaccagagcaactttctgctataagttaggcgtcttctccttctcatgcaaataccttgattcccttctcttcccctctaaccacctatgtatcttcaagttgacttttttttttttttaagagacagactgctgctttgttgcccaggctggagtgcagtggcttttcacaggcgtgatcatagtacactatatacatacagcctcgaattcctaatatcaggtgatctctaccttcagcctccagtatctgggattacagacatgcatcatagtgttctgctttggctcttttttttttctcaaagggctgtttaatggaaccttatggttagactttattttattttttcaaatattggaaatttaatactttttcagtagagatggggtcttgccatgttgcctaggctgttctcgagctcctaggctcaagtgattcttccacctcggcctcccaaagtgctagggttaacaggcatgaaccaccgtgcctggcctagactttattgtaactaattgcttattcataactttcagaatgtttcctaaattgtgctatataaaaaatgctgtaacgaagttttgtatgtatggcattttgcacaagtgtgagtgatattgagtcttagtagttctgttttaagctagaatctttagtttcgtttttctgccttatcttctggaccaaagctcttttagccaataaaagtgactgaagctgggcatggtggttcacacctgtaataacagctctttgggagactgaggcccaaggattgcttgaagccaggagttgagaccagcctgaggaacatagtgagatctccatctccaccaaaaaaaaaaaagtgagcagttaaagcttaaagtcataaaggttaggaggtacctaaaatgtccctcaaatgagaggttctgcataatcctgtcataaaggagaatcactttcgggaaccgataagtgagatctatagttatggccttggtcaaaaccaaatctgtttcagctttacatgttacgttgatacagtgactgacattcctttaatggtcttttcagaattaatcatgagggctgagcactgtggctcatgcctataatctcagtactttgggaggctgaggcgggaggatcccctgagcccaaggtttcaagactgggctgtacaacataatgagaccttgtctctacaaaaagataaaatgaaaattagccaggtgttgtggcacacatctgtagtcccagctactcaggagacaggtgggaggattggtttggcccaggaagttgaggctgcagtgagcctagatcgcgccactgcactccagcctgggcgacagagtgaaaccctgtctcaaaatagtaataatgataataatgaaaatgataaaatacagtcttgggaaaaagtagttaacttaccctaggggttgacttatttgattaaaacctagtgagtcaacctgctggaattagaattttaccagtctttcgcagaatttactttatgtctcccttccccactggtcccttgtctatggtgcttaaaaatttacttaagaaaatacatttaattaattttttgaaacagggtctctgtcacccaggctgaagtgcagtggaaaaatttactcttctatttggtgtgatttagcctcaaattcttaaaaatcagatacagtctgattttacattgagacttgagtttacttttttaataggattttttgaagtacacacattttttcctgttactgtttaaaagccactcatttgataggtattctagtgcataaggtatttttttttgtaagaaaagtgatttagaaaactcaccttttatttatttgagacgggagtcttgctttgttgcccagcctggagtgcaatggcacaatctcggcttactacaacctctgcctcccaggttcaagcagttctcctgcctcagccactggagtagctttactctctgccttgaacattttttttttcttattttgagatgaagttttgcttttgttgcccaggctggagtgcaatggcgtgatctcggctaactgcaacctctgccccctgggttcaagcaattctcctgcctcagcctccctagtagctgggattacaggtgtatgccaccacgcccagctgatttttgtatttttagtagaggcagggtttcaccatgttggtcaggctggtctcgaactcctgacctttggtgatctgcccacctcggcctcccaaagtgctggaactacaggtgtgagtcaccgcgcctgtcctatctgttgttttaagctctgaaaatacttgtctgataatgttttcttccaattaaaaaaaggcatggaaaagttaccatgatgtttcagaaatatatgtacctccaggtgggggcagggaaacttagccaggtatggtggttcatgcagtaatcctaacagaagactgaggcaggaagatcccttgaatccaggaggccggggctgcagtgagctattagtggcaccactgcaccccagcctgggtaatagaggcaagaccctgtctcttaaataaataaataaataaataaataaatacaaactcattatgatgaagacagatttgttataagttgtaattaaaatcacctttggaatttaagaaaaaacttgtaaaaaatttgactaggaacagtggttctttagttctttcagttgtctcacttaagaattttctgacctcttcctaggaaaaaaagctattttttttaacgtatgacttctggggattcagattcttgccaagtttatttgtggattccctaggtctccatgtgctccatgttaagaatccttgaactgcttttgatagtgattaaactttcaggctctaaagatactgttttaatatactatctaatgttttgattatgaaatgtgagcataactgaaagtaagttaaaaatagcagtcagttcagtattcttttttaagctcctctgtgtcaagcagttcctttagtccagattgatcaactcctgcacaagtgaaattaagttktgtcaaattatcaagtactttagtattcactgtgctaaatgactgtgactggaaatgttatgcatttgctttgctcaagtttggaattttttccacacgtgttaatgaccactcttaaaaccagagtttttttttgttgagacggagtctcgctctgtcgccaggctggagtgcagtggcacgaactcggctaactgcaatctccacctcccaggttcaagcgattctcctgcctcagcctcccgagtagctggaattacaggcacgcgccaccacacccagctaatttttttttatttttagtagagacgggtttcaccatgttggccaggatggtttcaatctcctgacctcgtgatccacccacctcggcctcctaaagtgctgggactacgggagtgagccaccagagttttacacattagagaacatctgttctatccttttctttctctggtgaggaatttgtaggccaaagaagttggatgaccagattcctgatgtacaattcggttcttcttcttttttccctataccttataggatagtttacctgtgtaaatggatttaagaagaaaatatgctacagattcaagttgtatggattctgaacacacattatgttttctgttayaatgaactatggatgcatatgtgctatagaaataaatactagaaacaaggaaatgaggacagcagcatccagcaggggcttttgacattacaattatagtaatcagagttctgatttaggtgccaaattcgtatcttatacagtgctgctttctaaaaacaaaataaatatgagaggcatagtttatgtaataatattatatcaaggaaaagaattcttatgtgtgtatgcgaaaaacgagttggactgttgtttcattagagttgaaattttctttgcaaatgtaatatatgaaggaatgaatgtggatataccaattaggcaattaaataatagggaatcttttaacttcagctaaaatcttagcagcttttaaaatttcttcccaagtgaagtgattgatggccctagggtcttttgtggcagaaacatgactgtgtggttggaagaactggataattggttaagagccctcagaatcaacagaaatacttcattattattcattctttcaagggctacatgacaccattgggggcattttatattttttaaaaatcctggccaggcgcggtggctcacgcctgtaatcccagcactttgggaggccgaggcaggaggatcacaaggtcaggagatcgagaccatcctggctaacatggtgaaaccccgtctctactaaaaatacaaaaaaattagctgggcgtggtggtgggtgcctgtagtcccagctagtcgggaggctgaggcaggagaatggtgtgaacccgggagcagcagagcttgcagtgagcggagatcaccccactgcactccagcctgggcaacagagcaagactccgtctcaaaaaaaaaaaaaaacctgaatgaagctattctaaaatttcttgagtacttaggcacagacatttttggttttgaattggccagtaactgagatgcttctgaataattaggattctactgtaatttaaagtaattttagatactggtttcagaatctaaggttgacatattttgcattaaaacaactggctatgttgtctttagattttcaattttttttttagttttcaataccttcacattatgtctctgtcagtttggttaattttgggcaaatgaatttatattttgaaagtctttacagttctagggattgaaggcattgtagttaaggaaacactagaaagaactaacaaatttatatcatgaaaccattggtgatttttttattgctctgtaactttcttaagattatagcttatactcgggaaaatgttagtaagtagctgttttgttttgtttttttttttttgkgactcttaaagacaactagattaccatcttactatgaggcagggacaaagtggttttagtaacataggccgatcccaaggccaaatttcagttttctgtaaccttgtgatttgcgtgtctctttattatccattcatgagattttttttcagttcaattaattggacattcattgaatgcataatatgcatttaccagtaagccaggtgaacaagaaaggcatccctgtgtaatggaaaacacagtcatgaaacaaatttctgtggcccaggctggaatgcagtgacgtgacttggctcactgcaacctctgcctcccgggttcaagcaattctcctgcctcagcctcctgagtagctgggattacaggtgcacgccaccacacccggctaattttggtatttttagtagagacagggtttcaccatgttggtcaggctggtctcaaactcctgacctcgtgatccgcccgcctcagcctcccagagtgctgggattacaggcaggagccaccgcgcccagccgaggaagtgtttttaaacttgaagagtaagagtttgctgggccaagagaaggagggagtgtgagtgagtttttggcacatggggcagcagatatgaaagctggaaggagagacagaaagcatggcatcatctagaaatatagtatgtgatggataatagaatcagggtctcatcaaaaataattattactgtttaatgactgtgttcaaagagttggcatcaagaattgttaggcaaacaaagtgtttctaattatgaaattcatatttagtctgtgaactattcactagcatgcagtgtggcagctgttcctgaagtgaggttggtcatatagtttttattatgtaaaaatagacatctttcattggcatcgtgtaccaggcactgttctaagcatgttacgtgcattaatttacttaattctaattgcagttttatgatgtgtggatattagtatcattcctattttatagctatgggaacctgcacagagggacttattagtttctagagctatgatttgaacccaggtggtctgattctgtagactgtggatactgaagaacatgtctattcctagataataactggcagtgcatgtatttttatactgtatcatttggacacatgaagtggaaacatgtttaagaacaggatctaagtgcttagcttacttgttttgggttgtgttttgtttgtttggttggttggttggctttttttgagacggagttttgctcttgttgcccaggctgggagtgcaatggcacgatctcggctcactgcaatctctgcctcccaggttcaagcgattctcctgcctcagccttccgagtagctgggattacaggtgcccgccaccacacccggctaatttttgtatttttagtagagacggggtttcaccatgttggccaggctggtctcgaactcctgaccttgtgattcgcccgccttggcctcccaaagtgctgggattacaggcatgagccactgcgcttggctgtgtttttttttttaagatagggtctcactgtgttgcccaggcatgatcatggctcactgcagcctcagcatcccgagtagctgggatcacaggcatgcactaccatccccaactaatttaaaaaaattttttatatatatataaaatatatattatgtacaatataaaatatatatacatatataatatatattacatagagacagggtctccctatgttgctcaggctggttttgaactcctgggctcaagtgatcctcctgtctcagcctcccacagtgttgggattacaggcgtgagccactgagcctgccgcttttcttggttttttttaatcagaagtctctttattgtaatttaattagaggctttcctacaaacatgagaccctgtttagtaacatagttcactttaagatggaatgcctctggtctggatggcatattcttttcctccccctccccacccagccagtcctggatttgaggaattttgtggttctggtgagaagggactctttgctgctctttcttaccggcaaaatatacagtcttgaatcacttaacgatggagttactttctgagaaatgcaccataggcaatttcatcattgtgtgaacatcatagagtatatttatacaaacctagatagtgtagcatgctacacacctaggctatgttgtatagtctgttgatcctaggctacaaacctgtttaatatgttactgtacttaatactgtaggcagttgtaatgcagtggtaagtatgtgtgtatcaaaataggaaaggtacagtaaaaatctggtataaaagataaaaaatggtatacctgtatagggcacttaaccatgaaggaagcttgcaggactggaagttgccctgggtgagtgagtggtgagtggatttgaagggctaggacattactgtacactacgatagactttataagcattgtacacttaggctacaccaaaaaattttttaaaatgtttcttcaataataagccttggcttactgtaacttttttattttataaacttatatttttaaacttttgatttttttgtattaacatttagcttaaaacacacatcatacagctgtgcaaaaatatattttctttatatcctataagcttttttctcttacaatcttttttaaaaaaacttttttgtgaaaaactaagacatacacacacatattaggcctattcaggatcagcagtatcactgtcttccagctcctcttgtcctactcgaaggtcttcaggggcagtaacacacatggagctgtcatctcctgtgacaacagtgccttctggaatacctcctgaaggacctgcctgaacctgttttacagtcaacttttttttttttttttaacaagcagaaggaatacactctaaaataatcaataaaagtatagtatagtaaatactaggcaataggaatttttcagttccattataatgttgtgggaccactgtcttttgtgcagttgatcattgactgaaactcatacagcgcatgactgtatttaaagtaccactgaatcagactaattttaaacgagaattttttttctcagtaagtctaaaaatatgttagagttatcttgcattcatttatatatcaagttgagttttgtgttttctttctttctttttttttttttgagacagagtctccctctgtcgcccaggctggagtgcaatggtgtgatcttggctcactgcaacctccgcctcctgggttcaagcagctctacttcctcagcctcctgagtagctgggactacaggcgtgcaccaccacacccagctaattttggtatttttagtagagacggggtttcaccatgttggtcaggctgatcttgaactcctgacctcgtgatccgcccgcctcagcctccaaaagtgctgggattacaggcatgagccaccgcgcctggcctacactttttcaaataaagtgcactgtccaggaccctgtctttattgttgtggttcaggtaagggttaaactaaaagtgctgcaagttctgttcaggggccagcactgactgtgcttagagaagtacttggccagaccttgcctatttcttctcctagtttaattggcagggctgctgatgtattggcaaggatgccaagacaagaatctatgggctattttctctgaacacttgtttctagtctgagtacttagttcatggttatacattggaattatctggggaagtttgtaaatttaacattgccagcccaacatatttttgttgttttaagagctgcttatgattttagtgtacactttgcagaaacactggtcatatgtgtgcttggcttcaatgcaaagatgggtagaatgggagacaaaagtaaaatcatacagctagcactgctttgtatattgaatacaaaggcatcaatgggaacaccaaagaagtgacagactggcctggaaaaccctcaaggttggtttagggaaaggtttttagaggatgatatttgagctgaattttgaagcataagtagaaaagggggagtagaatgtcgacataccagacccaggagatatttgaactaagactgtgtaacttgagtcagcatgtctatgcttggatcacagatacttagcttcaaaagtaatcttttaacttgaagtttcttttcttcagaagtgtagtccatgaatatatattcattactaaaatttctgttggctgggtgcggtggctcatgtctgtgatcccagcactttgggaggctgaagcaagtagattgcttgagcccaagaatttgagaaaagcctgggcaacatgaagaagccccatgtctacaaaaaaatacaaaaattagccaggtgtggtggcacatgtctgtagtcccagctactagttgggagggtgaaatgggaggatcacttgagcctgggaggttgaggcggcagtgagccaagattgtgtcactatactctagcctgggcgacagagcaagatcctatctcaaaaaactgaaaactctgttaacatgctgtgaatatgttatatactaaatagtcaagtaatagatatttattttcccttcacttacttttactattccaatctctaattcatcggtaagattccaraatctcactgaatattgaarraaaactcaaatgcttcatttatttttttgaggtataattctcataccataaaattcacccactcaaagtgtacagtttagtggttttttcatgtattcacaaagtagtacarcatcatcacttgctaattccagaagakttttgtcaccccaaaaagaaaaaccctgtgctcattagcagtcactctaccttcaacccctggcaaccatttatctgctttccaattctatggattttcctattgtacacacttcatataaatggaattatacaatatgtggccttttctttctggcttctttcatttagcatgttttcaaggttcatgtatattgtagcatgtattagtacttcattcctttgtaaatattttacctgaagtgttttctaaataaaaccttttaaaaagtgatagtgctgaagggaagcaaggtagaatttttaggagataggtaatctgtattggctctcataaaactagtcacatgtgaagcctgcattgctttagaacagggatttccaaccttttggcttccctgggccacagtggaataagaattgtctcatggctgggcatggtggctcacgcctgtaatcccagccctttgggaggctgaggcgggccaatcccttgaggtcaggagctcgagaccagcctggccaacatggtgaaaccctgtctctactaaaaatacaaaaattagctgggtgtggtggcacacgcctgtaatcccagctacttgggaggctgaggtgggagaattgcttcaacctgggaagcagaggctgcagtgagccgagatcgtgccactgcactccagtctgggcgacaaaagaaaaaaaaaaagaattgtcttaggccacacataaaatacactaacactaatgatagccgatgagcttaaaaaaaaaaaaatctgctgatgcacccatgagaggggagacagcactgtcgtctctcgcagttttcccttaacactcccttatctgcagacttaaactaggagcccctggcagagtcctacctccagaatcacaaaagtgtagaaggaaagtgagagacattgattgactttatatctgacttactagtttcctaaggcagagattttttagaaaactgcctggcctggcccagcccaggatagatagggatgggtaagaagcccttgagatgtggcagtatgtggcttgacttcagacttgtcagattaggggttttatagggtttttttagctcttgttttgattaagcttgtttgacttgcagggtgtctcctacctgtgttccagccacccgatttccttcctcaagaaaactgtttacttacactattcaaattagttattctcagggctatttttatgactttgtagcttttttttttttttttttggatgcagtttcacataataacattgctggctcktgttgctagcaagaactgattccagcatttatgttctttgartgtattgtcgcattctttcggagactcaagctgtccacatgaagtggatgaatttgacccagtattattgtccatcgtactctattgtaatacatcagccctagtgtgtaagtttgtgcttatttcagttacattaaaatctgagttgtctggatcatttcctcttctggcttagtagtgcaggacgagataatctgaaatcacagaagagtaaaaaatctgctgagttatttactccagctggatctcttaagactgttcaaatttcagacctaattgataatctgtgaaatattaaagtccctaaccaagctgtttcatttcagattcttcccamaaccttgaggtaggggaaagaatcatctttaatatgtcaactcgtgattattgaggcwatgatcacttttttaaattgaggaaaatgcttattagattgttgaagctgcctagaggggcaaaagaagtgataaggctggtatctctggtgcttcgtaattggtccatttaagtgtatgacctgtaggaatagtgtcaaagctaaggcttttggwcagacgtgtgaaatagtttgtaaagattcggtttggagtcttgcaagtctttttttctgcatactcctgctctttgcagtcactgcttggctaggcctactatttttggaagttcttgaatttccttttaacccagtcagtggttttccttactctgtggggttggtctcaggtagttctgcagttgatctgttcattaaccagtaagaaatgcaagacacactggtgtccaacattgggtctgcaaatgttagacacaggccttgatctctaggaactagtttagttggagagacagtaaggtagcaaagtgtgtaagggatggcttacagaaggttcattcctactgtagtcttttgctgacctcttaattgacaattgactttcaagatggtagaaatgctgcttttcatgactaaaataatgttttatggctcagagagccttacttcctaattctctagagcaaaacactgatttagggaatatgaaatgtatgtttatgtatggcaggaacaaagaatctgaggccagactcttgagtttgatttctagctctgccaaatattagcttgggcaacctcatttgacctctctgcttctttatctgcttaatatactaatctagctctatggtaattggaaggattagaatgtaaagaacagaccctaacgtaatactgagccttatgtagtgttggttattactgttttctgactttgcaaagatgctgcttcaccataaacataaaaagattgaatgtcttcctagtgtgtgggaaaatggtttgttcgtttcataaacgaaacaaagttcatttatgtatttgtttcacaaaatagataacattaaatataactctctgaagtgaggcatagattttgtgaaagcacaatgaatgctcatttaccgacagtggatagcaaaatgggatgttttgggtaaataacattttgatttcattaaaattatcatatgtgtaatccattttccatgggttaggtaataataaagttgatctttgcaactgctaaattgaagttttattttttaatccaaagtatttcactgtataacttcaagaggcgccatttatgcagactgtcatacgaatggtcctctcctgaagctgtgcggtatggttagccctgagagaggatgcttactgtgtgggagacaaccctccaatatctgcatgctttcatgtttcctaatttatctcagagttagtatgcagagtgtgaaagactgttttaatttttctttcctgatggtttggattttatacaaaattgtgttactggtacaattggattgagaatgcaaatctgagcgaaatgtaacttgtttttttgtttgcttcgctgaaaagttcaactgctctgcttccatctgttcttgtcttgccttacctattatggagtcctcaggcattaaattttgttgtgattgctgcatttgaaaccagaagtaacctgaagaaaaagggtcgagtaagtaaatacatggtagctatactagtatagtcactagcttgtaggccaggaaaagtacctgtttatgccgtatggtttttaaagaatattgatttgtctgtaaatcaactagccttgaggaaagtggctgcagtgacacaggagtgaaaaaatgtaaacatattaaactgtttttaagggcttttgtctttatcagaacaacaacaacaaaaaacattctagaatgttaattggattttggttattaggagaatggctaattttatttagattaattttatgtatttctttaatgagcaagtgaaaaaaacttgggaaaaaagcaggtgcccttagcaacaaattttctctttatttagatattgaacgttggcataaataccaggatgacagttcataatatccttctccttcagcagggaagactaaaacagtaattataggcctaaagaatgttattacaaaaggggaccttccagtagaaagaagcatatagcaataagattcaactcattctaataataataaagtattcagacaattttggtgctatagagaaccttttaaatgttcaagggacattttagaaggctggagaggtaaatgatttgtctgtggtcacatatcacattggtacaattaaaattggaattaaattcagatgtgctaactcttgagcctcttccccctccccacgctaggtacaccaggctgcttagttgaatttaactgtctaatgtgaaattagctcctcctctaaaaggttttaagtagaagttctttgataaagagattggttgacttgtatgctctcctcttttgacttcatttaatcccaaagagttatttagcttcttaacgtatttaccagcccccaaccccctcctgccttggtctgctaactcttaaccttttcttcacttcctttcctattgagtttagacttcattttagcaaccaacagaagccagctttggctagtttaagcagaaatgatattaagagttattagttacctcacacattcttcaggagggccaaagaaaagagggagccaggaacaaacttcagaatcacatcacgatgatttcagtgctcacactgtgtgcaacacattctacagtgtgtgcggtgtgattattgatgtcaagcgcagaatgctaccactagaactctgctgctgtcttagtggtaactactgcagttctctccagaatgggttatttctttgcttgtgatgcgcaagaagtgctggatgcatactaccaacctcattttgccctaaatgcttccaggcagtccttttgtgtgaccacgggtaagtttttctttttctacaagttacttaaaatttttacaattttcttatctcccagctccaacattatactaaagagtgggagctaaaggaacatatgaatgagtgggggaatttttaacattgtttaatagttaacatagacaaatgactaaaattacacataagggcctgaaatgaattaccaacttgaaaaaaacaagtaaaattttatgaaagaaaaaacccacaatctacatcattttttacataaaagctggatcaaagaaaaaaaccaagttcactggtttttgctaataaatcttattattttagtgttcaccacataaaacaggcttttaaaaaatttccctaattttaattcaagatgaatacagaagaacatttcctacctcacctactaagttatatacccactcccagaacctaaaatatgcaataggtttgttaatagtgcctcgaggaccatggcacacagcagtcccaatgaactgtgttactaagctaggtcctttcttttcattcagcattctgagacatctctgtcaaatcattcctgagataacagagttcattaagatagacagctacattatttaaatcactaaagtcttatttttattttttgagctggtgctaagaaaagttcaggcaatgaagtgttatgtcattcatcaaatcaggaaccatagaaaatggagatgcttgactgccacgagtctactaattatagtgctgaatattcaaaggacatttttaccaccaagaacttcatgagtgttttatgaaggaatagttgacaccatctttagctgtgatgccaatatttggaaatctttgaaaaaacaaagagggaaaaaagatggagacgaggtttttaatctttccagaaaactttaaaaatgtctttagaaataaacaagaacataatagccctgtaatctggttctgctcttcatatattaatagtatcctaactcacacctcctgtaccttaagaccttgactactcacaatgaaataaactgctggatgccaagaagttttactcttccttccagttatttaataccacaatgccatgaacaaaatagcaatgagtaaacatttgtaagtaaatttatatttcaaagtcacgaaacattttagagcatgttgatctcatgcactatcaaagataggcaaaatggtttaccatctgataattccaagtcaaaatagtatataccaatttttcaatcaaatcagtttttttcctatttttatcttaataagactatacttttctggttaccagttcaaaaagaaaaaaaaatttatgacattatggcttaaatttacctttttcatgaagcaccacttcacgattatgaagggttgaaaatagcccttttaactcccgtgctgtttactgtccctgccaaacattagacatttactgcttatgtagttaattgtctttattgtataccatcaagattaggaaacatgggccgggcccggcagatcacgaggtcaggagatcgagaccatcctggctaacacggtgaaactccgtctctactaaaaatacaaaaaatttagctgggcgaggtggtgggtgcctgtagtcccagctactctggaggctgaggcaggagaatggtgtgaacccgggaggtggagcttgcagtgagctgagattgtatcactgcactccagcctgggtgacagagtgagaatctgtccccccmgcccccccaaaaaaaaaagaaagaaaaagattaagaaacacatcctgaaaccagactgaatagagcccagcagcttggatttgaatcttcactctgtcattcactagctttggtcgattactctttgtttctcagttgtaaaatgagtatgaggattaaatgagctaatacatatgtagcacttaagtcagtatttggcatagtttgttcttaactgttacccgagattttcttttattgattctctgtatatctgggacagtgcttgataattgcatgtggtccctgcttttatggggcttacagactggtggggaggaaaatatacacagactataatacaacctgatgtgtttagtgggcagaagaattggggaggcaagatagacaagaaataaaggaattcagcttaacagtttttcttcttggtgggacaatttgttagtaggattattctgatttttgtccattgtcattgtcagtgattggaataatcttaaatgctgttcctgagatggaatttaccaatgaacacagcagatacagtattcctcatcagctctgggtggtacctaagcattgcagatgttcgttcaccaagcaagcatttatttagaatttaccaccatttactagctggggttcctctcttcaaatagtttagggtctgagaagtaaaccagcagttattgtgcgtagttacagtaagtggagaggtggtaatgaacaggaaactggaagtacaagggagaaacttttagactaattcagacctgagatacattctgatgtatctcagattatatatactttgactttcagaagtccctccagctcccaagtctccattccttttcactgagcttcacagaaatattgatctggtctaggtttgagggaaaaaattaggatgtagagatttctagcccaagtcatctggccccatctgttcattattacttcaagtggaatagagagtacttacctatttgttacctatcaacccataaataaagcttttcccaaaaaaggaatactctggtctaaagtactctgaratttagtctttggtacgcagaatcttagaaatagatttttcttccgtttttccttctctgaatctgccacctaagaaattttgagatttaaatatgtgggagtagaagggaaaagaaagaacaagggaggggtgtgtcttgagaatcattattctccatttgactttaggataggcattttcaggaaattctcatggacccagttagcttatctgggggagtctaagtggttaggagcaagataggcacaagaggtgaaagcagaaagggaatacaaaattgtcttagctttgcttggtttgcttttattagttttcttaagctattttcattttatttactgttggaatctataggtctttttcaaggacgtgtttaggtaggtgctaactttggtttggttttaccaaagcaaggagtgatcatataatgtaagtttaaaaagcttagcaaacttgggtacagtaacttttaagagcatcagttttttcatttgcaaaggaaaggtggtgaaataagtagatgatgtcttatgtccactagggggtagtgtgtactgtaaaaattaaaatagttcctcagtgaactctttacttcatcaytcagttagcttgtttgaattaatttttgttcatttaatgtgttttgaaattgccataaatttttttcaaacacaatcttgtgagtgtagcaaacagcaactgttgttacatgcatttctgttattagtgatgtcaaatgttctgacattacttttttttttttttgagacggagtttcactcttgttgcccaggctgaagtgcagtggcacgatctcggctcactgcaacctccgtctcccaggttcaagtgattctcctgcctcagcctcccgagtagctgggattacaggcatgcagcacgaggcctggctaattttatatttttagtagagacagggtttctccatgttggtctcgaactcctgacctcaggtgatctgcccgcctcggcctcccaaagtgctgggattataggcatgagacaccacgcccggcctgacattactttttgtatagaattttttgaggggaaaatagtgatgctttaaagtttctgtacaaaattttacctattatatgaaataaattaaattattcataatgaccaggcagtaacattataacatgattgtcttgtgtttcactctccagactaatttgggagccactaatcattccatgtggctgttgagtagttgaaatatgactagtttaaattaacatgtgctacaagtgtaatttgcacagtgggcattgaaggctatgataaaagataaaatacatcattaatttcatactgatttcatgttgaaataatattttgaatacatttttagataaaatatattaaaattaattttacttgtttctttttacttttttatttggctactagaaaatttttaaatacttacgtggcttgtattatatttctgttggatagcagtgctgtggagaaaagtactcatcagccatttttatcttagtgtatctctaggtggccttatgatttgtaaggaagtagtgtaatggggagcttgagcaaaactttggttctatttctaatcccagctagaaaataggcagtcagttttactataatgagacattatatgtttctaagaatgttatgttatacaaaatcatgtagtaaaattcacagggcttacagataaaatgaagcaaggggtatgcacttgaaaatgtccattgatgataattaactttttgttttgttttgttttgtttttaagagacaaggtctcactatcgcccaggctggggtgcagtggtatgatcacagctaactgtaaccttgaactcctgggctcaggcagtactcccacctcaacctcccaagtacrctaggactatagtcatatgccagcatgcccagctaatttttttagttttttggtttgcagagatggggtcttgctatgttgcccaggctggtggtaacattttttaaatgctcacttattgggccaagtgtggtggctcacgtctgtcatcccattgctttgggaggccagggcgggaagattgcttgaggcaggagaccagcctgggcaacatagagaaacccatctctacaaaaaaagtgataaataaaaatgcccacttatatatatagagggtgaacttgcagattctcataagtaacttacagttgtgtacataatgaagaattgacttgctttattagtgatcccaaaaaaggagcccgtttkttttatcttacaaatttttcataatttttttctttatttaaattttttttctataacacacaactttgtccagaaccctgtttgttaatattttagaatcgcttaaagatgtagtgacaggttggagtttacagagtaggtatcattgaagcatcactcagttttttaacacttatttttcagtaatgaaattggcagttactgagttatcagacagctcttgtttgagatgagctaaaagatctacagttgatattactggtcatatattgcaattttgtgtttcagagaatattctaaaaaacctaatcactgtagacaggatgcactgggatatagatagttactaactggaccaacttttctcacacacaaattagcactttttctaagaatactgtttattaccccaaaattttactgtacatactccaatcattgccttgcagaagagcatctaagacctgtcattgcttcgtactgagcacaaattatttttcaacttaaaaataagagtcctggttaatagagataggttgacagaatgtcagttgttataattgactaactacagtatagtttacagtagtgtgagtctagggtttgctcttcaagacccagtagatctgttgataattagatcaatttgatgtgatatttgattccttttaaaaatatttgtagcattaactattgtatgcgttctataagatgagataccttcctttagacttaattttgtggacatttaaatccataccctattcctttaccaacttacctgtctattttagtaastaacttcctgaacatagtctacattaactaatttcctgaacatagtctacagtgctttctattatgcatggccctaaactcacttctgtttgggattcaatccttggactgcttttaaacataatagaatcacaaaattcatttaagggttattctgtttttctgtaaacaactatggccttcctatgtgatctcatttgtcaacttttttttttttttttttttggtagtgatggggtctcactatgcttgcccagcttggtctggaactcctagcctcaagtgattcccctgcctgcctcagcctcccaaagtgcagggattacaggtgtgaaccatggcatcccacctgcaatgtaaattatttgtgccaaaagatagataaggccgggcgtggtgcctcacgcttacaatcccagcactttgggaggctgaggcgggcagatcactttaagtcaggagttcgagacctgcctggctaacatggtgaaaccctgtctctgctaaaaatacaaaaattagccaggtgctcacttggacccaggaggcagaggttgcagtgagccaagatcgtgccactgcactgcagcctgggcaagagagcgagacttgtctcaaaaaaaaaaaaaaagatagataagtgaaacagtaggaattttagccctttacttcttcacttaaagaaatcatactgtactctgtctttccaccaaagaatagtgtaaaaccagaaggtattttagttagtcatgtgttgaatagtggccggaaagattttatttcctagccagtttttgcctttttaggaaaaaagttgacatcagtttctgtggttgagactttttcagatgctgccatttcagacttgtttcatttagtttggattttattccttttttcccctcccacagtttatgctgtgggtttgttagggaaaccaacagtttagtgaaataattatgcatgtttttgtgtcagtccattagaacttgagagcagcatatattataaggactatttcaaaatgttttctacacacgaaagcttattttagaatgtgttccaattaaatctaggcytgatcaggtcacatgatgtgcttaatatgtacattctttacaaagaatatctgattttgagggtgaactgaagatgagaaagtaaatgccatacctatctctgccactgtgtattgagagtgattttgaagctattttgggatacgcttttggaggcctttctgtagctttttatagtagatacagagctgctactactttgtgtaactggtgagtggtggattgggactcttgggccctggctttcttttttttccagtcacccaatttatggctttctaaaaacatgaagacctggggtaaaattaaaggatggaggtgaggagagcccagaattcaaggaattttaccatccagttattttctcatttttctactcctgctattcatccctaatatcttaacttttttcctaaaaaatgaagaccagcctcttttgttctggtcacatgttaaaggacttcccaaggtcagaggcttcattattgcctcttgagctttttaatactctaaaaatgttttagtttgaacctaaagawcwtgtcagtttctcacttgctcttacatcgccatgatcaaaacaaaaaactagtcttaaaataccagagacattacctaaaatggccatgggtttaattaacacattttggggaagcatttgatttgtatttacatcttatgactatttcagtatattactgtgctgagagagaagttatttgttgttgttgtttttaacgtatgccctgtagcttgtggaatgaaacagtttatgatgtatttttttttaggtgaaggcagtgtaaataaaatgttctcatttattgtttttcatacctaaaagcttatttaaatatgaacatttttctggttaaaaataaatataagtagaagttagactatttttccccatacctgagtggctccttttgttttccttccataatgtgcacatcctgccttgaaaataaccctgccttaatgatgttaacgatgaaattctgatcgtttatttccctcttttcataacatcaaatagattcagaattcagtaaatattaattgaatatctattgtgccaggcagtgttccaaatgctgaggatatagcagtccataaaatagactcaaatccatcctctcatggagcttaaattctgaacaaaataagtagaaatgagatttgttagtagtgctgtggagataaagccagggagtggggatagggagtgtgcagggtagggttgaatggggtttgcaatttcagttatgatggcttcactgagaaaacatgaagatcttaggagctgagggagcaagccatatggatatcttggggaggaagaggaagtacaaagcccttgaggtgagcggatgcctggcacgttgaagaactacaaggaagctaatttttgtctggaacagagaaggttaggggatggagagagaacagctgaagataagtcagagaggtaggtggagtgagggcatcatatagagcgtcttttgggggcccattacaaggactatgactttttttttttttttttttttttgagacggagcttcgctcttttgcctaggctggagagcaatggcatgatcggggctcaccgcaacctccacctccggggttcaagcgattctcctgcctcagcctcccaagtagctgggattacaggcatgcgccaccatgcctagctaattttatatttttagtagaggtgggatttctccatgttgatcaggctgrtctcgaactcctgacctgagccgatccacccgcctcggcctcccaaaatgctgggattacaggtgtgagccaccatgcccagactttttttgaratggagtctcgccctgtcacccaggctggagtgcaatggcacgatctcagctcactgcaacctccgcctcctggcttcaaatgattctcctgcctcagcctcccgagtagctgggattacaggcacgtgccaccatgcccggctgattttgtatttttagtagagatgggatttctccatgttgatcaggctggtctcgaactcctgacctgaggtgatccacccgcctcggcctcccaaagtgctgggattacaggcgtgagccaccgcacccggctcaggactatgacttttaaagggtctgtggataatagacctgcgagggaggtagtgaggtcagaagcaggaagaacaggttaggaggctgttgtagtatgccaggtcagagctgatggttgcttggatcagaggtgtagcagtggaatggtgagaaacagtccaatcatgagtagaatttgaagtataaaaaaaaccaatttgccaatcaggctaratgtgtgtggcatatgaaggaaaaggtggatcatttggaaagatgggtttgccagtaactgatgtggggaagactttatgggaggagcaaaggttggggatagggaggtcatgttaagtttgggatgcttattagacattcaagagtgtatatcaagcaggtagttatagaggcaagaggcacgatgaggggwgaggtctgggctagatatgaattaggggaggcttcagcttatagagtgtgtttagtatttaaattcattgcattacatgagatcactgtggaaatgtataaacagagaggaagccctagaatagagccccagtgcatttcagtgttgcgatgttgggagatagaagaaaccaacaaggaaactaaaggaagctgctgccagacaaggaggaagagagccatgagaatgtttataggaagttagataaagctttgcaaagaggaaggagaccagctggataagatgtcgcatttaggtaagataaagattaagcactggacatttgatttaaccttgtggaaatcattggtgaccttaacaaacaagttagcgataactacagcttgattggagggtatgttcaagacagaagaggaggagagaaattggagacaagcaaagtagaggttcctcttcaaagactttcctccccatctaattaggaataaatagtaacttctcttagaagcaaaatttattcgaagacctgtgcaaacattcttaaatatttgctagccataataaagaaatcaatatactttatgttcttagctcccacaatttagcctaaatatttgccctggcatgcttatactggtccaagcaagcattaggtcatagcctgttcctcttccttatttaaaagtgtttttacctttctcagcattccacaagttacttcctccttcctttgttcccctctacctttacctcttttaaaaagttctaagttgctagccagtcaggacaaatacagaatgtgagatcccgttccagccagtggaaaccggacacagcagtagggtggacgcgtcaggttataaatgaccctgtctcctttgttcagtatactcttgtggcaaaactcctggcgagtgtaccctttctgcaggaagtaaaaatggctttactaaataaattaaatttatgttcaagtgctatttctttatggtaccgaagaacaaacatttcagagatcagtaagatctagtgctcaagaccgattggccctagccaagagtacgtgacatttcatctatacaggagaaaaaccagagtgtatgggtgcagatgcagggaaatgtccaaatgctacagtgggaactgatggaagtatctaacttgtcatgaaataggaagcaggacatcagccacaagtgaggatggggatggagatgctggaggtttgaagagagaagagaaataataataatacaattatttaggggagagggagaatgatgaaaaagagaactaatggtatgattgttgggagtattaagggttcctctgaagttaattgtcaattttagagtaatcagcattgttaaatatatttctttagtcctgttcaggtacctgggcctcttcttatctcctttctttagtccgttacatttttcagaggggaggttttcagtgggtttaaaaactaatttttggccgagtgtgttggcccatacctgtaatctcagcactttgggaagccaaggcgagcaaatcacttgaggccaggagttcaagaccagcctggccaacagggtgataccgtctctactaaaaatacaaaaattagctaggtgtggtggcgcacacctgtaatcccagctactcaggaggccgagttgggaggatcacctgggcccagggaggtcgaggctgcagtgagccaagatcttgccactgcactccagcgtgagtgacaaagtgagatcttgtctcaaaaacaaacaaacaagccaaaaaaaaccaccaaaaaagctaattttactttttaaatagcttggttttggttgagtttagagcaagttgccttacttatgtaatcctaatgttactttattttacttgagtaaaaaatcagttttattaagctaattttattaacatatttgtagacatttgtagccaaaatgtatgataacatcattagtattcgcttgcagtttcattcagctggttgtaattatttaaatggtatttttttgaattttgcattttataagctaaatctgttgggagattggagctgttctattatgcgtagttctaagagatgaactttctaattttacttttggtgtctagcaaaatgacatttgtttcacaaatgtgtttgtttttctgtcataggaaacccagcgtttgctggcagaaccagttcctggcatcaaagccgaaccagatgagagcaacgcccgttattttcatgtggtcattgctggccctcaggattccccctttgagggagggacttttaaacttgaactattccttccagaagaatacccaatggcagcccctaaagtacgtttcatgaccaaaatttatcatcctaatgtagacaagttgggaagaatatgtttagatattttgaaaggtaagtgttatctttatcagcatatgctattattaagctttctcctttttctcttaagcattccatgtttagaatgtaaacattatacaaagatcagagaggtctgtgggagggaagtgaagcagttctgggcctgtttttttcatgctttatcatactgggcctgttgccttcatagataagtggtccccagcactgcagatccgcacagttctgctatcgatccaggccttgttaagtgctcccaatccagatgatccattagcaaatgatgtagcggagcagtggaagaccaacgaagcccaagccatagaaacaggtatctaatattcattytccttcacaccacttccacttttacaaatttgtattaccacttaaacttttctaaagctcttggcaaggaaaagaaatagaaaaaagtataataagtgagatcctgcttatagtatgtaaatacgtcttaacaaaatggcttgctatgggaccccccaaatataaagacaacctgtaattgaaagatcttggagtctcttgtaactacacctggtttaacaaatactgagtgcataccatttatctagttatatgtaaagaatactggaaaacttgaactgtttttgtaacccmwttgattaargtattcagctgtttatggctacggaatttggagtcaagaagcttctgctacagattttaagaaaattagtggggagaattgtgtatctagaaatggacaacttgattcatcctcttgaattttctagaacttcttaattttattgtagtgttttggtaattggacatttacaaaatctttcagccctgatccaatttatagaaaaaggygtgaatttaacagattacagcrtgacatttccataattaatagtggttgtttgccatttatagtttggaaagtaacatattgaactaagtaaaataataatcgtatgtttgtttctgtctacagctagagcatggactaggctatatgccatgaataatatttaaattgatacgatcatcaagtgtgcatcacttctcctgttctgccaagacttcctcctctttgtttgcatttaatggacacagtcttagaaacattacagaataaaaaagcccagacatcttcagtcctttggtgattaaatgcacattagcaaatctatgtcttgtcctgattcactgtcataaagcatgagcagaggctagaagtatcatctggattgttgtgaaacgtttaaaagcagtggcccctccctgcttttattcatttcccccatcctggtttaagtataaagcactgtgaatgaaggtagttgtcaggttagctgcaggggtgtgggtgtttttattttattttattttattttatttttgaggggggaggtagtttaattttatgggctcctttcccccttttttggtgatctaattgcattggttaaaagcagctaaccaggtctttagaatatgctytagccaagtctaactttatttagacgctgtagatggacaagcttgattgttggaaccaaaatgggaacattaaacaaacatcacagccctcactaataacattgctgtcaagtgtagattccccccttcaaaaaaagcttgtgaccattttgwatggcttgtctggaaacttctgtaaawcttatgttttartaaaatwttttttgttattctactttgcctttgtacagtttattttactgtgtttatttcattttcccaatttgacaatcgtattttaaaattgaaactgatggaacattctttcttggtcttcaccatctgacaaattgaatggcaagaggtggattttgccagtttcttttcactgatgcagatttgtgttaagatagtactgaatggagtatttataaactggccctgagcatgcataaagcatcagtatctgacctttttttaaccttctaggaatttgaaataaatgtgtttgtgttgtctgattagatgatcattggtgtcttgccacaatgtttaaaaattactgtacaggaaagtcacagcaaagatagcagttgtgactgacatgtaggactttcacagttgtgccacatttttgcctaaaatttgggttatgacatttttcttggttcttatctgaaaatttcatctgtaacctttcatgtgtgttaagaaacactgatctgatcatttgggatttgctgaggcatttgtgagtcttccttataaacctgatgagcagatctcaactatctagcttgtgtgtcatcagaaaggtttatccctttgagagtatcaagtcctcagttaatgattcttgctttcatccctccagtatttgctgtgggagctcgttttattctttaatttggaattcagtaatttttcttctttattgacgaattcctcccctcacaaaactgttctttcccacctctctccatatctaattcctgattcttgttatttttaagtcataaatgtagccagtcataaatacataaatgttaaccttcgggttgcaaccttgtctcttgcagtttaaggtaatggatattgtagcccatttgaattttcttcactcttattctcgtaattctggagtttcttcagattgtggtgtattttattgtgctcctatgtaagatgaagaattaactattaaaattacattttcaacatacaaaagcttttgatgactggtaactggtatccttccaaataaatgcattgcttggtaacaaatgttagcttaattcagaatgaaatagttaacaaccctaatattgtaaaatttgaaaactgatagcagctgtcatttataacaattcttgggctgtttaaagggtacatttgactatagctaaggaaattgaatctcactttaaaaatgaaccacacaaaacttcaagaaacgaaatagaaatcaacatttactgcccgtaatattgctcatggttatagctagtatcacatagtgatttacaaaccatgaaattccagatttaaatctgttgcactacaaaaatgtctaaatgatgtctgctaaatttgtgagttatagaagtacagaaataagtcattttcatttcaaatgcagtgaatttctaatttcatggtatcatatttttttcctttgcagttttggtaagactcccccattactttgctaagacttgctttctcaaccagtgggatgaaacgagtgccagtgtgttgactgagccttcttaggacttaaggggctctgggagaggccaaggcagcagttgaaaactgcagcttcacctggcctttgggcctgttttccctggcccacacagtgtggctggttaaaacattctgaatttgatgccaacatttttaaaaattgggagatttgcatgaaaatccagaattcgggtaacttttgaatgatctgaagatctggcaacagtagacctgacccacctttgtgcacgggacttaactgagaggatctgagtagcagacaccctaagagcatgtcattgtcttctcaccagttactctccagttggctagagtcccctccgagcacacctgctagtccttcccccttgtaagcctttgactttgtaatccctgggctaaaggaaacacattattcaacaaaagtgtttcatgtttgcccactagttgttggggatgattaggtggtgagtgaatggcatggggctttcctttggggaccatatactctaatggggaagggggacagacaaatagttgtaactctgtcatggaaaagagaagtaacttggacagacttttggattcaggccagatgaacatctccaggcagagggaacagcagcatctgcaaagtcctgggagagaagaaaagaatctgaacattaagtggcttcctgaaaatcgactgcccaggccgggcacagtggctcatgcctgtaatcccagcactttaggaggccaaggcaggaggatcacttgagtccaggagtttgtgaccagcctggctaacatagtgggacccagtctttatttaaaagaaaattgcccgttaagaggcttttctaaaatcttgaggtgttgataggagctttatgttttttgacttgattgttgtagtctacttcgctgcgatttgcttctgctctagttatccttcatcctctcaaaggctgtctagcaagatcttaggtctaaagtaaagtcatctcttggtatttgtcgggaactggttctaggacttcctttggatatccaaattcgcagatgctcaagtctctggaataaaatgatgttgtatatgcatacaatctacacaaatcctcccgcttatgttaatatttagattacttataatacctattataatgtaagtgctatgtaaatagttacactattgtttaaggaataatgacaaaaatatacatgttgactacagacacaatgttttttggaatattttgtctggttgtttgaatccacggaagtggaacccatggatatggagggccaactatatagaaccttactctagaccaagaatgtacttgtaaaacaatttcaaagaagcacttaaaaataagattaaatacaaaccaacagataaaagtcacaggtgctatggttgtttgatggagaatggggaaggaaatctgtcctaaaagacattataaacacagtgacctaagtggaactaaattggatcgaggaaatgataggaataggcctcatttttctgttgaatggttcaggaaccttttttttttttttttttttttttttttttggctgctctagccactttctagctctgtagtttaggctggagtgctgtggcatgatcttggctcactgcaggttctgcctcccgcgttcaagcgattctcctgcctcagcctcctgaggagctgggactacagacacctgccaccacacctggctaattttttgtatttttagtagagacggggtttcaccatgttgggccaggatggtctccatctcctgacctcgtgatctgcccgcctcggcctcccaaagtgctgggattacaggcgtgagccaccgtgcccagccctgccacatcttttttgttagttgcagtagcaatacaaccttatctagaaaagctggccaaaaaagaaaataccatgataatagggtacctaatttattgctttatttaagaaaaatgtaatatttcattcgaataagtacttttgggctgggatgatatttcatttagctacttggcatgccacccatcttagggaattatatgagggtttatactttaaataacataaaaagcaaaacatgctgaatgtaataatttgagagaagtgtaaataataaaaatctgtcatctaccacctggactagtaatatattgtttgttttcttaactatacactcacccctgcactcatctccattttatcgtggaagtcaggtatattccaagagttggctttatggtactaacttgccattagctgccatgctgggagctggactaaaatttttcctcttgtgtggaatccaatattaagagttcgggtctccccggccctctcccagtttcatcttgtcacccttgagctgatctcatttcatgtgtcttgtatggccctgctgggtggcactggtaagtgtatgaacatagacttgataccaacctctgtctctactactgaattgatcacatgatttttctttctcagttttatttttaaagactcctgatccatcttaccatatgactgcttttgaaatagttccatgatgtagattagtaaatatcgatagttcttaagttttattataacctagtaagtttacaaagtctcctggcttaaggtcgggagtagatatcagatctggcaaaagcagcttagatgtgataggctgattgcactagattgaacttggtgctgtttctcttaggttttaacaggacacatcaggactgagcaaccaagtaagtccaagttattacaattcatgttgtttttttctcctaaaacagtaaatatttcggcctttgtggaccataggtctgtctcaactactgaattctgccattgtagtgagaaagcacccacagacgatttgtaaacaaatgggcatagtattttttttaaaaaaaaaaaaacctaaaacattaaaaaaattttaaacttgttggccgtacaaacaggcagtggggtggggtttggcctgtaggttgtagttctctgccctgctcatgtctatttcccaaaacattttttaaaccatacaggcgtttaaaaacaaaatctacaatctgtacaacctcattttaagtgactaagctttttcagtgtatgccaatacatgcataaaacaggtagttctgtctagtagtgttctgcctttttcaatcactattgaaaggactccctgtggcagcacatagctctttggtaaccacaaagtatccagtaaatagattgccatgacttaatcacatttgaatattaaattggtaccagtttcataaatcctacaacacacatatttgaccatagcttggttgtgcaacttgtccatttgttgactagactcccaggagtggaactgttgggtgaaagggtatgtatgcagctgtgataaaatactactcagtagctctccgacaggctgtatcagtttccactcagatccttacgcaaatgtcatttctaatgactgtaatattacaccatatggatatattgcaagttaaccattacaaatcctttgctgctgagcattttattttaatggcttttcactctagtgccttgtcttggtatatgtctttgtccacattcccgtagatacgttgaattcctagtatatttacttcgtcaataggcatgtttcttaaggttgataaataatgatggccaaatgaaagtacttcactaacatgaatttgaggaaaagttgagaaaagcaggaaaatttacttccattgtctgatactgattagcatcaggagagtgggagtctacatattgggagatgtttgtcaaatgttacaaaaatgcattaagagtaataccgggttatcagaatttgctgaaatcatatcaaggtggaagaattagagaatagttccctggctagaagacgttgaacctttgagtgtttaggtctttgctataatgtcttgcttgctaagataggccttaatggccctctcatcgtactgctagaatttagccagtggcaccagtcaggaaggtattaaagtagcaccagcgatagattacttttcatcctgacttttgtcctagagctccataaaatgtgcatttggtgggggaaatcacgtctacaaataaaattgtattgcttttgaagatggtataagtctatagataaaaaagctgtaaaaccttgaaaaatactgaaggatgtaaaaacaccaagataggccaggtgcggtggttcacgcccataatcccagcacttagggaggccgaggcaggcggatcacgaggtcaggagtttgagaccagcctggccaatatggtgaaaccccgtctctactaaaaatacaaaaaaattagccgggcgtggtggcaggcgcctgtgatcccagctcctcgggaggatgaggcaggagaatcgcttgaacctggcaggcggaggttacagtaagctgagattgcaccactgcactccagcctgggcgacagtgtgagatgctgtctcaaaaaaacaaacaaaaaagccaaaactacaccaagataaatcacttatctctaccccactagaatataagctctttgagattagaaaattgttttgtgctcttatcacaaatactaggcataaagaagatgcttattattgaacagcaaatgcttaaaaagacctgcaggccagacgaggtggctcatgccaatcatcctagcactttgagaaggctgaggctggaggactgcttaagcctaggagtttgagaccagcctgggcaacacagcaagaccccatctctaccaaaaaaaaaaaaaaattaaagagtcctatagagaattcttatactccaatgtgaagacaacattggaaagggccaagtttctcatgccctccaactaagaaacccctaataaaaaatgaagtgacacttgaacaggacttaaggattctacagttggtctttggcagcagtatgttttaggaaatgtaatgcggcgggtggggcggtgacttagccagttatgcttttaaatggaactgcaataataaaagtgatactagtgcagaaagtatctgtattagaattctagagtaagtcaagagctcacattcattaaaataatgacacaactccacgggggtggggagaacagcagtaaagcaaccacatactatactattagactggcaacattgagactgaaaatatccatgaggagaatactgacatcttagtggtaagcatttccttttaacccggtaattccagtagtaaggatcatacaaatgtaccgctaggaagaggtaacgtatatgatcatcaatgggagaacagtaaaggtgttactgtggaattcccgacaggctttcacttggagggggaatatttgaacacaagtttaaacaacccagggtaagcacacaatgcactatgcactgaaaggtatacgtttccgctgggtgtttatacatttcaaag

SEQ ID NO: 95829 - DNA, 27323 bp, Homo sapiens
caccaatcagtgctctgtagctagctagaggtttgtaaaatgcgccaatcagcaccttgtaaaatgggccaatcagtgctctgtaaaatggaccaatcagcaggatctgggcggggacaaataagggaataaaagctgccccccarccccgccaccaccccccaaccccagccagcggtgtctagcagctcggctccccatccaggttgtggaagctgttcctttgctcttcagaataaatcttgctgctgctcactctttggttccatgccacctttaagagctgtaataccacgaaggtccacagcttcatttttaaagtcagcgacaccaagaacccaccagaaggaaccaactttgcacacgatattacaggtatataacatcaacttgacttgttgctagtgatattaactttgatcacttggttaaggcagtgttagccgggtttctccactgtaaagttactgttatactccttccatactctctttagaagtcatcactaattccagcccactctcaaggggagtaagaactatctacctgtctatattgtttggaattcttctgtaaggaggatttctgccttctccctcccatttatttataacaatataaacatgtttgtttttttctgttctttttttttttttttttttttttttttaagacagtcttgctctgtggcccaggctggagtacagtgttgcgatcttggttcactgccacttcgcctcccagtttcaaacgattctcctgcctcagcctcctgagtagctgggactacaggtgcacactaccttgcctggctaatttttgtatgtttgcaaaaatgaggtctcatcaagttgaccaggctggtctcaaactcctgaccttaggtgatctgcccaccttggccttccaaagtgctggaattatggatgtaattatataccacacctggcctgtatgaacaagtttttactttgttttttcaacttttatgttcaggggtgcatgtgcaggttcgttacataggtaaactgcctgtcacccaggtgacgagcatggaacccgataggtagttttctgatcctcaccctccacccaccctccaccctcaagtaggccccagtgtctgctgttgccttctttgtgtctgtgtgtactcaatgtactcaactcccatttataggagagaacatgcagtattttatgtttttactttatactttcatttgttcgatttttaccttactttgttgctcaaagctttattgttcacctttcatattaaggtttattatctacctctaatcttttgtatcatatgaaatcggagtcttgctctgtcgcccaggctggagtgcagtggtgcaatctcggctcactgcaagctccgcctcccgggttcacgccattctcctgcctcagcttcccaagtagctgggactacaggtgcccgccaccacgcccgactaattttttgtatttttagtagagacggggtttcgtcgtgttagccaggatggtctcgatctcctgacctcgtgatccgcccagcttggcctcccaaagtgctgggattacaggcatgagccaccgttgcccggccttcttttgtaatgtttcttgtaagatttttggtatcaggattatattggcctcataaaatgagttgaaataataagtttggtattatttccttttttttttttttttttttttccgagacggagtctcgctctgttgcccaggctggagtgcagtggcgcaatcttggctcactgcaagctctgcctcccgggttcacggcattctcccgcctcagcctcccagtagctgggaccacaggcgcccgccaccacgcccggctacttttttttttttttttttttttgtatttttagtagagacggggtttcaccattcacaggatggtcttgatctcctgaccttgtgatccgcccacctcggcctcccaaagtgatgggattacaggctgagccaccgggtattatttcttgtttattctctcttaggtttatacccatatttttttttctttttctttttttttttttttggtttgagacggagtcttgctctgtcgcccaggctggagtgatgtggcgtgatctccgctcactgcaacctctgcctcccgggttcaagcgattctactgcctcagcctcccgtgtagctgggactatagtctcccgccaccatgcccggctaattttttgtatttttagtagagatggggtttcactatgttggccaggctggtcttgaactcctgacctcgtaatccgcccgcctcggcctcccaaagtgctgggattacaggcgtgagccaccgcgcccggcctatacccatatttcttacttaagtatttggaagaattcattagtgaagtcatttacgcttggagttttcttcatggaaagtttttcattgtggatttcaatttatttagtagatataggactattcagattttctgttatgtcagtttgtgtcagtttgatttgtctatttcatctacattatcaaatgtattagcataaattgctcaaaatatccttatctttttcatatctgtaggatttgagagctgtcccctttttaattcttgatatcagacatttgcaatttctctttttttcttgataagtcttgctagcggtttatcaatttttaaaatcttctttttattttaggagatagggtctttctatgttgcccagactagactccaacccctgggctcaagcaatcctcctgcatcggccacctgagtagctgggattacaggtatgtaccacagcacccagcttaattttgttaatctttttattttttgtttttaatttttttagagacagggttttgttccgttgcctagactggagtacagtggcctgatcattacacactgtgacctcaaactcctgggttcaaaccatcctcctgtctcagtctctcaagaagctgagactacaagcacaacccaccaccgctggctaatttttaaaattttttgtagagactggtcttattgtgttgctcaggctggtctcgaactcctcacctcaagtgatcctactgcctcagcctcccagaatgttggaattacaggcgtgagccaccatgcctggcccacattacctcttaagatgactcaaaagcgcttcaaacataattgtgcccaaaacaagctcaaagtctttcctctcagacctgattcttttccagtgaacctacacatttattgtaggtttgagttaagaaaagtgccaacagtgcaacacataaataggcaaaggacatgatctgacagtccacagaaaaataagggctttcggtatgaaaaaatcctccacctcattcataagaagaaaaactaagttgtatctatacaatggaatagtctttaaaaaaagaaaaaagaggacgctcttaacatagtgatatgccaagatctccaagatacattgttaagtgtaagaagaatatatattcataattgcttgtatttacataaaactgtggaatatttaagaaactaataaaggtgggctggtacagtggctcatgcctgtaatccaagcagtttgggaggccaaggcaggaggattgcttgaggccaggaatttgagaccagcctgggtaacatagtgagaccctcatctctacaatatacatacatatatatatatatgtatgtatatgtgtatagatgtatatattaggccggtggcatgtgcctgtagtcccatctacttggcaggctgaggccagaggattgcttgagtccagtcatggcagtaagccatgattgtgccactgtgctccagcctaggtgacagagatcctgtctcaaaaaaaaaaaaaaaaaatttaatttcaacctgatttaaaaaaaaaaaaaagcggccgggcgcggtggctcacgcctgtaatcccagcactttgggaggccaaagtgggcggatcacgaggtcaggagatcaagatcatcctggctaacacggtgaaaccccgtctctactaaaagtacaaaaaattagccaggcgtggtggcaggcgcctgtagtcccaactactcgggagactgatgcaggagaatggtgtgaacccgggaggcggagctggcagtgagccgagatggcgccactgcactccagcctgggcgacagagtgagactccgtcttaaacaacaacaacaacaaaaaagcagtgctatgatcgggtgttaacttctcagtagtacttcaaattatggtgagggggtgagttagaagctgaggaatgggtgcagggaagttggatgtggtatgaatgatctaaaaatgagagcaatgtgccaagtactgtgctgaatcattaagtatgcaatctcttttattcctcatagtagccttaaagttggttggtatcattttcgttttaaagatgatgaaacagtgactgaaaagatctaagaaacttgccgaaagtcccacagctatgtagtgggattgcatagactcctggactcagggtaccaacctgagatgagttgttcaagagcattgacttggctgggttccgtggctcatgcctgtaatcctagcactttgggaggccaagacaggaggatcacatgagcccaggagttcaagatcagcttgggcaacatagtgagactgcccacccccaccccggccccatctctaattaattaattaaattttaaaaataacattgacacaacatggaggaggaaaatagagcaagtggagaggggatagagacttaattccatcagctcccctctttcccctcaccactcttcctttccctgtgtcccgaacccgtgtttctaagtcctgactgctattattctggtgtattaaatacatactatttactatttaatacatcttttgttgttgtttgttttctcaaattttttgtggagacagggtctccctatgttgcacaggatggtcttggactcctggcctcgagcgatcttcccacctaagctcccaaagtcctaggattacaggcatgagcaaccatgcccagcctatttaatacatcttatttaatatatagtataatacgtaaatatgtactatttaatatttaacacatattaaatacaaatggtccccaacttacaatagttcaacttaagatttttcaactttatgatggtgtgaaagtgatagacattgaatagaaactgtacaatattcaataaatgatatctaacactgtcttataaaatatgctttgtgttacatgattgtgccgttataagctattataagtgttccaagtacgtttaaggtccactagtctaagctatgatgtttggtaggttaggtgtttttttgttttctgttttgagacggagtgtcactcttgttgcccaggctggagtgcaatggcgtgatctcagctcaccgcaacctccacctcccgggttcaagcgattctcctgcctcaacctcctgagtagctgggattacaggcatgcaccaccacgcccagctaatttttgtatttgtagtagagacaggatttctccatgttggccaggctggtctaaaactctccgcctcaggtgactcacccgcctcggcctcccaaagtgctgggattacaggtgtgagccatcatgcccggcctaagtgtattttcaaagtgcatttttgacttacaatattttccatttatgatgggtttatcgagaagtaaccccactgtaaatcgaggcgcatctccaatctagaaggcagctactccttaataacccctttcccataaaacatgaatctaaatctacaaaccttgttatataataaagcaagatgtactctgttatgatcagtgtgcacgttagagcaagcactacttttccgatcttaattattccagagatgcttgaccaatttactgggtacgtgggcagttttctgattgctgtttccacactctgctttcccacagagagatttccgcagttaggggctgctatttcaacgcagggagataaaaagaaaaaaacacttgctcttctaccccgctaaaaacactcatcctagggagcacgccagcatttgcagcgttcggggcagggccactcggcctgcggccgttgcactggctggaagctggcaggcgatcacggttgattggctcgggtgcggtccaagggcagcaacgccttcggcgggccgcctagggtgattggctgctgcagcccaccccctagccggtttggtgggcggcgaagcctggattggtggarctaagagctggctcagtttcagcgctggctcttcgtgcatggcagagatggcgactgcgactcggctgctggggtggcgtgtggcgagctggaggctgcggccgccgcttgccggcttcgtttcccagcgggcccactcgcttttgcccgtggacgatgcaatcaatgggcyaagcgaggagcagaggcaggtgaggagactgacccccttcctggccccaaggcctccttcctgcctggtccccaaggcctccttcctgcctggtccccatcggcccagcgcccacccagccttggcttttgcccgtgggccgttgggagcgccagcgcgggggcgggacgcggggcctccgacctcgggtccagtcctctgacctcggcctcacgtctgtggagtgaagatttgagaccgtgggacagtactgctggaagtagagaggaggagtcgaggctgggagagctcctgagagactgatggtgttttggtggaggattggccaggctacctaccgcttgtggcacaagggccctcaatctgtatgtagttcacttacacctgaacaggctgaggtatgcttctcacacctgggtggtcatcgtaatcaccagggagtcttttttgtataaacagtttgggggttttaaaaagccacagtgagctctcctgtcgctcttcagcccattgggtcaaaacacaaaagttgaacaagtacttgaaagaagtagttggaggccaggcgccgtggctcacacctgtaatcctagcactttgggaggccgaggtgggaggattgtttgagctcaggggtttgagatcagcctaagcaacatagccagacccccatctcataaaaaatagaaaagaagacgaagtagtatttacaaatggagcagaaccagagtccttcctgaggtttcacttggaggctggatggagttggcggaggtatgagcctcccagcaactccgtagtttatgtttatagccagcgagcgctcagagcttccgtgaaccacctcaagtggaaagggttcaatccctattctcaagctttcctggcaagaggagtttcttttcttttttcttttttttttttttttgagacggagtttcactcttgttgcccaggctggagtgtaatggcgcgatctccgctcaccacaacgtccgcctcccgggttcaagtgattctcctgcctcagcctcccaggtagctgggattacaggcatgcaccaccacgcccggctaattttgtgtttttagtagagacggagtttctccatgttggtcaggctggtctcaaactcccaacctcaggtgatcctcctgcctcggcctcccaaagtgctgggattacaggcatgagccaccatgcccagccgccaagaggmgtttctaatctctttgggtaatcagacccttttagccaaaggttcgggggcttaaaagagcctgacaactattgagatctggcagctgcctggaatgcagctggagcacagagggtgggaggtgggaaggtgctggggaagctaggagagtcagctggggtcagctcctgcagggcctagtaggcctgggtgagaagcttgtgttttattctaagtacagtggaaaccaatggaatgatttttatgtaaagtgtgacgttttaaaaattaccatcaagctgtctaggctgaagaccttaagaaagaggggtgaagatcatctctgaggaggcataaactactgaggcctctcagtttcagtctgatgctgtttggggaagttacttgtggccttttctcttgaatgtgtctgggtagtggagatgctgtctgcagtggcatctgtttacctctctcctattagcttystcagaccatggctaagttccttcaggagcacctggcccccaaggcccaggagatcgatcgcagcaatgagttcaagaacctgcgagtgagttgggaggyccgggcagtcgggggcagtcagggagtggggctgagctgcactgctgcctggaagagctcacacagttttctggtaaatgaagyctctctaagaatgcagcccctctctctgaagtgtttgggtctcattgytccagccacatgtgactggctgccttcccctcaacacttattccactctrctccattctgttggcaggaattttggaagcagctggggaacctgggcgtattgggcatcacagcccctggtgagtatagtgtctttccctaaaaagaacttttcttatgtgccctttaagacagttcccaaaagaagcaggaagggaagggaaagattgtgcttaaagaaacccagaactgcatcttttggacctgtgaaagcacccattgattgtcagcccagagaacaggacactcttctattttattagacagtgatgtagagaaggcagagggattaattaggtcattgtggctcacttggatcaggatcagtccaactcttgaactctgcatacttaataggctcacccaggtgatttgggaagtttagaaaactctggatcaagtggttgtcttcatagtacctcagtcttactgcctcccctaatccctataagctttgtcctaccagtggcctctcggcaggaacactctgggcaggtgtgtccctgcagggactgcctgtgtcctcttctgcttaaaccttggagctcatttgggagcagatagcggggggagtagggtaggggctgggcaggggagagagatgtctatctgggcttccaggtgaggtggccagatgatgtgtttaataggctgtccggagggagaaggcagggagctagcaggctctggtttggatgatattaacgtctgaaagaggcccagactggcttgcagtgcccggtaaagagatgagcctaggccaggcgtggttgctcacacctgtaatcccagcactttgggaggccgaggcaggtggatcacctgcggtcgtgagttcgagaccagcctgaccaacatggagaaactctgtctctactaaaaatacaaaattagctggtcatggtggtacatccctgtaatcccagctactcgggaggctgaggcaggagaattgcttgaacctgggaggcggaggttgcagtgagctgagattgtgccactgcactccagcctgggcaacggagcgaaactccgtttcaaaaaaaaaagcccagcctgcttgggcctgtattcactctgggcatgagagtatgagtggaacccaatatacttctccttacatcctagaaagttatatcacctttcataaaatgaaaccacttgaagattaattgaaaccatcttaatgtaaaagcattaggggaaaggctgctgggtactcctaagcaagactctcctactgtgttttgggggtttatgtaccccactccctgcagacaatatgcttctgaatcagattgtattttacggaagaaagaggcagttagaaatcagatgaaaatggccaggtgtggtagtgggctcctataatccgagtgactcgggaggccaaggcaggaggatcgcttgagcccaggagttcaaggctgcaatgagccatggttacaccattgcaccccagcctggataagagagtgagagcccgcctcttgaaaaaaaaaaagaaaagaaatcagatgaaaactctttcaagggaacctgaaaaagaaagctggttacaagttctggtttctgcatgatgtcatggtggctgtttctaatgtcacctgccttcaggctttccttcctgcagttgtaggggcaggtcaaggtttccttagagcctagaacgagcctgacttattggtcagagtgaacatgtgtataggaccttgctaggcttgacccaatcagcagggctgggggtggtatcaggtgtctcagccacttggagtttggatctgctgccaaggaaaaaccgtatattttatgaggagttctgaaattctctgccagcatctcatctgccctctgctgtacagctcacctcaagattttccctgaggctgtggctctcctgtcctgtcaccagtcctgcttctttctttttttttttttttttttgagacagaatctcactctgtcgcccaggctggagtgcagtggcgcgatctcggctctctgcaagctccacctgccaggttcacaccattctcctgcttcagcctcccgagtagctgggactacaggcgcccgccaccatgccyggctaattttttgtatttttagtagagacggggtttcaccgtgttagccaggatggtctygatctcctgacctsgtgatctgcccacctcrgcctccyaaagtgctgggattacaggcgtgagccccatgcctggcctccagtcctgcttctttgggttcagccctatgctataaaatctcaccttcctcaggccttttgcagacacatcagatcctctggctttgtatctgttcttggtgctttggacaccacctccaycccaatgcctttgtttttctccaggccctctttcttcatttattcatctgcctctgcatttctgtaactttctgagtagtgggtgctcaggttgttcacgtatcttcatcaagaagtctgtctgggataaagcagaagttgcaatgattgccttctgaatcacccctcagctgaggagcaccagcaggcaaaaccagtccactgagcttgtaagcaggtctgtggcatcagcttattcttgttgctagagagaatttggagtaggtgctacaaggtgcttcccttctgccgtcaaatgtaagattcttaatgaatgtcccgatttaatctgggctgcgttttccrctcccttgtaccacaccactcacagttcagtatggcggctccggcctgggctacctggagcatgtgctggtgatggaggagatatcccgagcttccggagcagtggggctcagtyacggtgcccactccaacctctgcatcaaccagcttgtacgcaatgggaatgaggcccagaaagagaagtatctcccgaaggtgaggaaatggaaatgtaatacacgctaatctcacagtgcaaccaccaactaaaagataccctctccccttgggggccagtcagacctgctttctgtagcatgctgccatgaaccaaatgtggttaggaaggggccatggattgctttaaaatacttgagccaaaaataataaaaataggaccagaactcttgcattgaacaacagacagacarcatttgaagagaactctaagaaatggaagagtaggactagcttcctttgcaaagggaatggaaaaaggagaggcattttcagccttgtagccattgggcttagaagagacttctaggactttaccgayaccctggtctgagagcgaagtttgaaggggtttaatgtggacaggaagaggcagtaccagtgagctgctctagggtactctgaggttgtaacaaggcctgttgggggttttccttgcagctgatcagtggtgagtacatcggagccctggccatgagtgagcccaatgcaggctctgatgttgtctctatgaagctcaaagcggaaaagaaaggtgaggccactctcaacttgggagccaaaatgggcagaggtacagacattatcaggrtaatggagcaacaattgtgggtggcccctgctgggtttccagaactttctcaaaggtggacagcttcttgctcagcagaaggtctatggcctggctgagacaggccaagatggcttgagcaaatagccaacatcctgcccttaggaaatcactacatcctgaatggcaacaagttctggatcactaatgkccctgatgctgacgtcctgattgtctatgccaagacagatctggctgctgtgccagcttctcggggcatcacagccttcattgtggagaaggtgagtataggtgggtgcagggccaggaggcttctgcctcctgacagtggtaccagagatagcccgttcactgatctcaaatggaatcagtgttgtgtgctctgcaaggcccccagaggtgggggtgaggcagagagcagactgcaaggagggtgaccaaaagtccaggaagtccagggcagatgggtcacttctgaagacggtggagccgtcctcagcgccaggccacacaaagaggtctagaaaggggaggactaaaaggaggtcaggacatgacggtcagggtaccattggtggatctgatgaatgtggccatgggagactgaggtgtgggtgggatgcaagtggagactgcccctgcaacagccttgacaacagaagcaagaaggaagcagagcaggagttccaatgaaaagttaggagtttgggtttgtttttagaaatgagagaactgagcagattttttggtcagaaggaaaaaaaagggaagaaaaaagaaaataragggagaaattgaaaagtgtgggaatgagtgggcagaacacaatggtgagctggggcagaagagagaaggatgggttacaggtgatggtgcaggaaccacttgcctaacgatcatgaggaggaagccaggggccctgtgaaggctggggccacgagtgggggagttggcaagagtttcatgagcgagtattgtaaaggtttgcggtaccctccatagagagggggaaagtagctgtctagggttggagcagtagggacctggctgagattggaaatctcaaggttgcgtgatgccaccctcattacaggctgaaggcagcatgtgccagcactttgctggtcacttgccaaaacatgctgcaacccagtagtccaggtcaaagtacagagggctcagttcagccctagtgggatccctttgggtacagacaggagaacaacagaggataagggaattgaccgggctggtgacagtgtcttggaagtaatgtcccctgggggagggaaataaggccaggggggtcgggagggctcagggaactgagcatatcattgagaaagaagtgtccccatgagaactggggagaacacaagctagtggcagaggaggctgggatcaatctggggcgttagcaccggaaggtcccggggggagcatgggactaggatgctgccatgctgtgcaggtacagggactcaataggaaggtgrgtgccttcttcccagaggcctttcctttaccaggcccccttggggctaatctgyaaccaggaccaccttttgtttcctgtaaagggtatgcctggctttagcacctctaagaagctggayaagctggggatgaggggctctaacacctgtgagctaatctttgaagactgcaagattcctggtaagtagcaccgggaatcggggagcccctctcctgacccccttccaggctgatctggctgttctyaagttgagaaagcctctgggttagagaggcttggcattgttagcgcttcagtgacatgtggctargctgtgagctggggctgctggacagcgctccttcctggccagggccctgcagcrgcatgcctaactggcatcacacactccgcatagggtctgtactcagtagccggaggagaagggtcagacctaccctttcccattgatgtccttcagtcttcctgtactttcgcccatccactgcatgtgagtaactcattaactcacgtttttgtaaaatattttaaaaatgagttattcatttttagcattaatgatgctaagaaaaaaaaacaaaacatctgaatccactgatggaatcccgactcagtagagagaaggcagttctgcttgagtatgagtattttctcccctgaggtgtaactgaaatctgacatggtggagcactgtgggagagccagcacagccatcatgtactaaccagaccaggggcatggatttgttgtttggggtttttttttgttttttttktttgtttgtttgtttgttttgagaaggagtcttggctctgtcacccaggctagagtgcagtggcgtgatctcagctcacggcagcctccacctcctgggttccagtgattctcctgcctcagcctcccgagtagctgggattacaggcatgcgccaccctgcccagctaaattttttgtttgtttttttgagatggagtgtcgctcttgttgcccagggctggagtgcaatggcgcgatcttggcttactgcaacctccgccccctgggttcaagtgattctcctgtctcagccttctgagtagctgggatgacaggcacacaccgcccagctaattttgtatttttagtagagacasatggggtttcaccatgttggccaggctgctctcgaactcctgacctcaggtgatccacctgtctcagcctcccaaagtgccaggattataggcctgagccaccttgcctggccaggggcatggatttgatcaacagttaggtttgctgtctgcctcagccatataccacgcctatcactgacagcccaaaaaagtgtactttaattacagggagcatccagggagggggagctgtgcagctccttctttgttgacaggaaaaaattcagctagcattaaaggcaggtcagtagtgtcaacctgttttcctgcccacacctcccaaggccatccagtctcctggctttactgggtggagaggtgctcagcagcttctgtcactagctctgaatggcctgtctcctggacaaagaagctttcacggactactctgcagggaggtgacattggaccagagctgactccacctgggggaaagagtaattctctggtttctttataggtgcctgtgtagaaagagtcagggagggattgggtgacttctagaccaattaacttttcttctttcccatccaagggagtccagagagggaagggaaagatctaacaactstagcctttgtggttggcctcgtggatggggtgggagtcctggcagctccacttctgactggaaggggttcacttgatccttttctttcacctggaaccttagttgaataaaggtcaagtgacatattttagtgccttacttgagagccatgtttccaaatctagtacctttgataaaagtgaggaggctgtggacagctctctccctctgaccagcacttatcctggcagctgccaacatcctgggccatgagaataagggtgtctacgtgctgatgagtgggctggacctggagcggctggtgctggccggggggcctcttgggtaagtgtgagaggcttgagggaagctgggctctgtcggcctcctcggcaggtgacccaccatragcagcagcagccttccccttgcggggccaaagggagctgcctcttggccctgctctctcctgggagatgaaaggaacctcctcttcccatgttgaatttcttcccacagtggggaaatatcattaagtaacagacaaaaggcctgaggagcagggtggcttactcggctgtgaaacgacacctgggctgtcacgcccctgcacctctggycagtcagtgccgtaactgtggcaagactttctgaagttgcttttctcctccctgggattctggccttcccacgctagcattttgccaccacacccggtggtgggatgaggaggtgcccacggggcctttctcctttctgacaggctcatgcaagcggtcctggaccacaccattccctacctgcacgtgagggaagcctttggccagaagatcggccacttccaggtgagccgagtgcttttgctgacatgtactcttcaactgggctaaagttttctttgaaaagagaggaagtgaggtgggcaccgtggatggttactgtctcctctagcaaattgagcttgactgcttggaatgcagtcttcctcagcatgcagcctgactctggaagtcatcaggaagttcaccacattgccacctcgattcctgtgtgaggtggatgaactagacattgtaaggttggagagcaaagcgtgcaagttgtgggggcagaagggaaagaggttgctatttgtagttagaccttctggtccgaagaagctgctggaaggtaataagcattggagtaaatggtgccttgggagccatgcctttcggaggcagtgatggccacttcggggtgtcatgcgggctgtggaacagccactctgtggccctaactcccacacctgcccccatctccatcatcctgagtaaatcccatctcctctccatgcccctgcttcctcatccttggctgtcttgttgccaytgctgacctgcttttggtaactgagagagtgttccagcatgttgacctgtgacatccctttgtgcccagttgatgcaggggaagatggctgacatgtacacccgcctcatggcgtgtcggcagtatgtctacaatgtcgccaaggcctgcgatgagggccattgcactgctaaggtgagggccagcctcagtcggggagaggcgggggcagtggrccagctgctgagacttgctgtctgcgtgcctcrcagggccctgctgaccccagcttcctccygtaggacygtgcaggtgtgattctttactcagctgagtgtgccacacaggtagccctggacggcattcagtgttttggtgagtgatccccacttcccagtcccggggctccctcactcctggggcctgtggctgcttcagaaagcagtttcagggcgggyrtggtggctcacacctataatcccagcactttgggaggccgaggtaggcagatcacytgaggtcaggagttcaagaccagcctggccaacatggtgaaaccgcatgccgggcatgatggtgcatgcctgtaatcccagctacttgggaggctgaggcaggagaatcgcttgaacccgggaggcagaggttgcagtgaacaaagattgcaccattgcactccagcctaggtgacagagcgagaggctgtctcaaaaaaaagcaatttcctctccacttctccactcctcactatgtgcttatgctaggcccagctgagctgggaccttcgggctctttctgtcccagttacaaggaggaaatggaaagcaaatgagaaaactgctagatgccaggagttgctgctgccttcggcaacacccccctctcatcctccccgcctcatagatgctaggaaatgggaaagggagatgtggctgggcacagtggctcacacctgtaattccaacactttaggagactgaggccagtgaatcacctgagatcaggagtttgagaccagcctggccaacatggtgaaaccctgtttctactaaaaatacaaaaaaaaattagccaagtgtggtggcaggagcctgtaatcccagctatttggaaggctgaggctggagaatctcttgaacccaggaggcggaggttgcagtgaccggagatcgcgccattgcactccagcctgagtgacaagagtgaaactccgtctcggaaaaaaaaaaaaaaaaaaaggccgggcacggtggctcacacctgtaatcccagcactttgggaggccgaggcaggtggatcacctgaggtcaggagttcgagaccagcctgaccaacgtggtgaaaccccatctctactaaaaatacaaaaattagctgggtgcagtggtgcgcgcctgtaatcccagctactcaggaggctgaggcaggagaatcacttgaaccttggatgcggaggttgcagagagccaatatcatgccactgcactccagcctaggcsacagagcatgactccaaaaaaaaaaaaaaaaaagctaaatggaaatttctagaaatagttcataagtttcaaatccacaccatcctgaatagcttgaagtgttgtgccatgctgctctgtcatgtttggtacgtgaatcgtccctttgtgcagcctatctatgctatgtgggctacctgcccgttagtagtcacctagggtatccaatcagctgtcctgatatcagagtgcctgtgttcaagtaactcttattttgctcagtggccccagattgcaagagtagtgatgctggcatgtcataatagttctattttagtatttgttattattgttgatctgttactatgcctagctcataaattaaactttctcataagtatgtatgtatagggaaaaaaacaacatatatatgggkttcggtwctatctacggtttcaggcatccactggggtcttggaatgtatcctccaaggataaggaaggactagtgtattccccacacccctccctcttgctaccttttgctgcttttctttaatcaccctctcctcctgtggcctgtttctatatacttggcattctgtttgctttctttgttttgtcaatcacttcctttcttctctgcccaaaccctggttgcaggtggcaatggctacatcaatgactttcccatgggccgctttcttcgagatgccaagctgtatgagataggggctgggaccagcgaggtgaggckgctggtcatcggcagagccttcaatgcagactttcactagtcctgagacccttygcccccttttcctgcacctagtggcctttcttgggaagtagagatgtggcggctttcccaccctgcccacagcaggccctcctgcccagctgctcttgtcagccctctggcctctggatgaggttgagttctccacaacagctcccaagcatcatgggcctcgcagccgggcctgtgccacggctagtgttgtgtgatttaaaatggactcagcaggaagcatattgtctggggattgttgggacargttttggtgactctgtgcccttgctctctaacttctgagcccacctcccagggtaggcacctgggggcatgcaggtgcccacctcccagggtaggcacctgggggcatgcaggtacccacctctttctcttgggtgaggctctggcaaggagatctctctgctcaagcacagcagaatcatggcccctctccatgaattggaacttggtacaggttaagtatccctaatcctgaaatctgaaacacttgtggttccaagcattttggataaggcaaattcaactttcagtctcttttctgggggaaaaaaataataaacctagcctagccaggcgtggtggctcatgcttgtaatcccagcacttcaggaggctgagatgggtggatcacctgaggtcaggagttcaagaccagcctggccaacatgtggaaacctcgcctcaactaaaaatagaaaaaaattagttgggcatggtggtgggcacctgtaatcccagctacttcaggaggctgaggcaggagaattacttgaacccaggaggcggasgttgcagtgagccgagcttgtgccattgcactccagcctgggcgacaagagcaaaactcttcaaaaaacaaaacaaaacaaaaaaaccctggcccttgtttcttccagtttctagaggtatcagctcctagcagcttatgaacacatatgcttgcttggccaggcaaggtggtgtgtgcctgtaatcccagcactttgggaggccaaggcaggtggatcacttgcagtcaggagttcaagaccagcctgtccaacgtggtgaaaccccatctctactaaaaatacaaaaattagccaggggtggtggtgcacgtctgtaatcccagctactcaggaggctgaggcaggagaatcacttgaacccgggaggtggaggttgcaatgagccaatatgacaccgctgcagtccagcctgggccatagagtgagactctgtctcaaaaaaggaaagaaaaataggctgggcacagtgactcatgcctgtaatcccaacactttgggaggccgaggcaggtggatcacgaggtcaggagttcaagaccagcctggccaagatggtaaaacctcgtctctactaaaaatacaaaaattagccaggtgtggtggcaggctcctgtaatcccagctactcaggaggctgaggcagagaattgcttgaacccrggaggcagagtttgcagtgagccaagatcacaccactgcactccagcttggacgacagagcgagactctgtctcaaaaaataataggccaggcatggtggctcaaggtctgtaatcccagcactttgggaggccgaggtgggcagatcacaaggtcaggagttcgagaccagcctgacgaccaacatggtgaaacctcgtctctactaaaaatacaaaaattagccaggcctggtggcacgcgcctgtaatcccagttacacagaagactgaggcaggagaatcgcttgaacgcaggaggcagaggttgcaggagctgagatcgcgccattgcactccagcctgggcaacagagtgagactctgtctcaaaaaataataataaaataaatgaacacacatgctgctgagtccgcaggggggcagagcagaggacagcgtgcttttgtgtactgttggaagactggctcctcctgtacagcacctctgagcccttgtgcaccgccctgccacgggcaccatccagtcctggccgtgtgaccacccacagctgactgggcagcaggcacaggccctacccgagcaggccggagttggctcgcatgactccagctgaggctgcctgtgtacatttctccagataccctatggctaattttgttataactgcacagtggctgctgccattttgtattaaatatattgtgaaacaaacctatctggggagaagcaatctacttgccgctgcttcctgtctggatccagcttgtgtccttggagagtggctggcccaggtcctattccygtcctccagcccgttctttcatgagggacaggaaggtaaaatcagcccttaggagagaggtctcagcctccctttcccagatctcccagtgagttttaaaggaagcagggagcccagagtgctaagttcttacagccagaaggaagcttatagatttctgaaaaccgcccctttgtttttaaaaagatcaacacaatttgactttctcaaggtcaaaacgaactagaatccagatctgctcatggcaaaaatgggggtgttctgagaattccagctttgggccgcactgtacagcagtctggatagagtgtgatctgagaagggaatgggtctgggttgttccaccccttccgagttccaaaaagagggaactggttttcttggttctcagcccagcagcacctatcctggctcttggtcctggcctgcagccaagtgctgttcctagcctgaggcttgagacaggtggggttggctcctcaccaaccccagttccgtcccatcctgagggcaagatcctgggctcataggcagtccctttcacttccttgtcttgctccctgctatgttggagatgaatgtgactaaaagggccatcttgctggcttaatgtgtggctggagagaccagcctggagacaatgtggcaaaatggggcgcttcatccagtctgtctaagccctgtcgacttggggaggtgatttctttcctggttctatatgtgaagcaaaataaatgttttaaaattaaaagcaaaaaaaacaaaatgaaccatgcagcctgagtggtaaatggaagaacaaggggcacgtctactttggttcttgtgggcgtgtttggttgcctacatgcattgggcaaatctgcagcaccagctgccagcactgctccttcctgcggctggctcttactccactccaattttaggcaggtcacactatcagggcagctcgctgctgttgatgctgcctgccctgtgggagggcaacagaaccttgggatgttttttaagcgtggtctgagcacaccccttatcaaaatttggcaacctagaataaatgcaggttcctggatcctgccccagacctaatcacatccccaagggtgagtctgcaaggcaatcttctacaaccaccatctgagtcctaaagcaggcttccccaggagcctaagtcctaattctaaatccatataatctagtgataacaatcccttgcccatgtaaccctctcaagtctgagatccttgatctttgcacaaccgagtgcaggaggcaaggtttygcgcagggccccctttcagaagaccggtaaggtgagttgccctcggtggaatgggactagacctggtgtcaacacaccgcgcggtctggagagaggttcccagtccctgcctgccgggtgggagctgggacctaagacccaggtggccatctgtcgcgacccccagcctagggcaggtccagagtccttcctctgaccctctccctcgaggcagcgcgcttcttcgagcgcagcactggcttgccagacgcagctcgagtgtcgcatggagctcgcctgacccctgccggctgcccgcggggttgggttgcaaacgcgcggagccagcctatatggcctttgcctggggttcaaggcccccagtttgggatttcaggactcgacgacgttttgttttagccaataaggacatggaagaggggttgggggaagcctatcctctattaccatcatttcataaaaggctttttttttttgagacggagtctcgctctgtcgcccaagctggagtgcagtggcgcaatcttggctcactgcaagctccgcctcccaggttcacgccattctcctgcctcagcctcccgagtagctgggactacaagcgcccgccaccatgcccggctaattttttgtatttttagtagagacggggtttcaccgtgttagccaggatggtctcgatctcccgacctcatgatctacccacctcggcctcccaaagtgctgggattacaggcgtgagccaccgcgcccggccaactttttttttttttttttttttttaagacggagtctcactttgtcatccaggctggagtgcagtggcgcgatcccagctcactgcaacctccacatttagggttcaagcgattctcgtgccttagcctcccaaatagctgggattacaggcatgtgccaccatgcctggctaatttttggaatttttttttttttttttttttttgagacggagtctcgctctgtcgcccaggctggagtgcagtggcgggatctcggctcactgcaagctccgcctcccgggttcacgccattctcctgcctcagcctcccaagtagctgggactacaggcgcccgccactacgcccggctaattttttgtatttttagtagagacggggtttcaccatgttggccaggctggtctcaaagccctggcctcaattgatccaccggcctcagcctcccaaagtgctgggattacaggcatgagccaccacgcccagctaggccaggatttttatttgtttgtttatttatttatttttgagacaggatctcattctgtcacccagtgcagtggcgtgatctcagcttactgcagcctcgacctccctggctcaaggatcctctggcctcagtcctcccccttgccacccacccccagccccccagtagctggaactagaggtgtgcaccaccatgccagactaatttttgtattttttgtagagccgggctttcaccatgttgtccaggctgggctcaactgctgggctcaagcgatcctcctgcctccactttccaaagtgttgggattataggcgttgagccagtgtgcccagcccttaaatttttgtatatgctttatgttcactgttttaaaaaatactacagtttttaaaagcttatttaaaaaaataaaagtcccctgtccctcctatccccattcccactcccaggacaaaaccacttttgaatctttaaggggcttcttttgataattcacttcatacctctaagtgacatgcttacttattgatttaattgtaagcacttttaaggatagtttttgtttttgtttttaagacggaatcttgcgctctctcgcccatgctggagtacagtggcataatctcagctgactgcaacctccgcctcctgggttctagcgattcttctgcctcagcctcccgagtagctgggactacaggtgcacaccaccatgcccggctaatttttgtatttttagtagagacagggtttcaccatattggccaggctggtctcaaactcttgacctcatgatctgcccacctcggccccccaaagtgctgggattccaggcatgagccaccatgcccggcccaaggatagttctttaaagtgcatacatttgatttatgagaagttatgcccatacttttttcacttcctcgggccagccctgtccacgggccagtgtttgggagccctgaaatcaggtggtgcagagccccattcacattcctggctgtccccaacccctgcccacacttggtacccagagcctacagccacgctagtgccgagtgggagctctcctctccctgtgtgcgccacttggttactcttgcagggggccgttccagaatttggcctctttccctcacccaccacccacccactctcagaggctagcctggtatctcttaaatacttcctggatcttaacatcctgccaacttgccttccttcttccaggccatgcccctcaacccttcctctacactgaaccagtgaactatcaagctccccgcaaattcttcagtggctcccagcacctgtaagatctaaggcttggcaaggcaaatatgactctgatccccctgggccttccccttctgctgcttccctccttccctgctgaatgttcgtgttcttgttgcaaggagtcctcactgccatgtttctcatccctgtgcctttggtctggggcagctctggaagtccttccagcccttcaaactttctcttgcttcctcatctctaaagcctcaggccagggcctgcctccttcaggaagacctctcttctccaaccttccctcattcctctgtctccatctcatccatcctggatgggtcccctttctccttctccctgggcatatctgcactgatgggcttgccacacagttgtttattccagtttccccagcattaggcaggctgtgaatctgagagctaggactgtgatttgactgtctttacatgatcaccatccagcacagttcctggcatgtaataggtgcacaacaaatatttattgaaagagtagatgagtagtcacatgacacttagctcacattttgctggtatactgttatttgtgtatacggtcctctctgtaagatctttgaggtcaaagaccctctctcacttatctgaactctcccaatagcacccggggctcacagtaagtgctcagtggctatgttcatgctgaatgagtgaaatgacaggtgggccagagccctggcctaatcccagcattggcagaaacagcagggccagccggctttgcctggccctgttttctccaggccttcccaccctggagtggccagagcccagccgcagaagggaggccctcatccccgtactcctctgacccactcagagacagaaggaagctgtgctaaaagaccctgaccctcctctgctagctgaagacgagaatgggagctggaaggggaaaggggcagagcagagccacacagcctttgtgttcttgtgtgaaatgcatggtatatatgggagaatatatacatgcacatatgcagtgtgaaaaataacaaactcctgtgtacccaacacgcaggtcaatgaagacagtattccaagcccatgtgcccctccttgacatattctccccaggggagccaccatcctgaatttggtgataatcctccccttacctttctcaatggcttcctgcctctgtatagatccctgaacaatattgtttaggttgcctgatttcaaactttctatagctggactcatactatatatatatatatatatattcttccatatcttgctttttggctcatcattgtatagtttttgttttcttgttttcttggtttttttgtttgtttgtttttcattttgttttgaaacagggtctcactctgttcatgatcacagctcactacagcctcaaccttttgggctcaagccatcttcctgcctgggcctcctaggtaactgggattacagggatttgccataaagctcagctaatttttttgtattttttgtagagatggggcttcatcatgtcgcccaggctggtctcagactcctgggcttaagagatctgcctgcctcagcctcccaaagtggcctccatgctcagctcttttaaattttttattgtttttgagacagggcctcactttgtcacccaggctggagtgcagcggcgcagtcatgactaactgcagccttgacctcccgggctcaagtgattctcccacttcagtctcttcagtagctgggattaaaggcccagtccggctatttttttttttttttcttaaatgttatagagacagggtctcactatgttgcccaggctggtctcctgagctcaagccatccttctgcttcagcctcccaaagtgctgggattacaagtgtgagccacggtgcccagcctcattcatgttaatgagcaggactgtaatctcttcaattttttttcttgtgtagtattccataatgtggaaatacaacaatttaattgtccattctactgtcgatggacatttgggctgtttccagtttggggctattctaaaacattcctggccagacgcggtggcttatacctgtaatcccagcactttgggaggccgaggcgggtggatcacctgaggtcaggagttcgaaacaagcctggccaacatggtgaaaccctatctctactaaaaatacaaaaattagccgggtgtggtggtggatgcctgtaatcccagctactctagaggctgaggcacaagaatagctagaacctgggaggcagaggttgcagtgagccgagatcacaccattgcactccagcctgggcaacagagcgatacactgtctcaaaaaaaaaaaaagaaaagaaaaaaccattcctgtgggtatcttctgatacagatgtgcaagtgttcctcaagtcatagtcccaggaatataatttatctgttgtaggctatgc

SEQ ID NO: 95830 - DNA, 35634 bp, Homo sapiens
  misc_feature (1)...(35634): n = A,T,C or G
gctttgcaggtggttctggtgtgatatcaagatggagaaccacagggctcagtacccgacttcagttcggcagcctgagtctgcccgtttttattggcagctctgtcatttgactcagatggagctggctgtcagcgaaaaccctcagttttattcacacatgcttctgctaagctgccacttccccaccctgtccttgtacagtcggtgtcttggcaccaagcccagatctctcagttaagccctgttcatttcaccttgggaggtttaggccagtgctccaataggttagaatgtttttggatcctgagtctgtcttccaacatattcctgtcttcgctggctccttgctattcgcaaagttgaggggcttgttctctgtggctttgcccaggtcctgataaaaaggtggatcagatgccaagtttggtggtacatgcccataatcccagctactggagagggtgaggtgggaggattgcttgagcccaggagttcaagaccagcctgggcaacagggtgagattacatcgtatattaaaaaaaaaaaaaaaaaaaaaaactctctcttggcatcctcgtgaaagtgacattgtctttaaaccctgcgtggcaatccctgatgcacygccgtgatgcccagggaagacaggatgacctggaagtccaactacttcaagatcatccagcttttggatgattatccaaaatgtttcatcgtgggagcagcaatgtgggctccaagcagacgcagcagatctgcatgtccctctgagagaaggccgtggtgctgatggacaagaacaccatgatgctcacggccatctgagggcacctggaaaacaacccagctctggagaaactgctgcctcatatctgggggaatgtgggctttgcattcaccaaggaggacctcactgaaatcaaggacatgttgctggctagtaaggtgccagctgccacctgtgctggtcccattgccccatgtgaagtcactgtgccagcccagaacactggtctggggccagagaaaacctcctttttccaggctttaggaatcaccactaaaatctccaggggcaccattgaaatcctgagtgatgtgcagctgatcaagactggagacaaagtgggagccaacaaagccacgctgctgaacacgccgagcatttctccctcctcctttgcgctggtcatccagcaggcatctgacaatggcagcatctacaaccctgaagtgcttgacatcacagaggaaacttccttcttgcttcctgaaggttgtccgcgatgttgccagtgtctgtctgcagactggctacccacctgttgcatcagtaccccattctatcatcagtgggtacaaatgagccctggctctgtggagactgattataccttcccacttgctggaaaggtcaaggccttcttggctgatccatctgcatttgtggctattgcctctgtggctgttgccaccacggctgctcccgctgctgcagccccagctaaggttgaagccaaggaagaggtggaggagctgggtgaggatatgggatttggtctctttgactaatcatcaaaaaacaaccaactcagccagctttatttacaaaacaaggaaataaaggcttaacttctaaaaaaaaaaaaaaggttggaccaggacaggagtaagaacagaagcaattgatcaatactgatgaccttccctatatgcaatgcaccgtgcccacctagaggaggacatcatataatttatttctatcacacttattaaaactggcccatttcacagagggattgacagaggcagaggagtgattgtgcccaagaatgtcacactgggatgagagctaagcctctcctgccacctacagctctcatctctaggtttgttgtctctcagaggaaaggcaagagagaaaagtgacaagattggcccttccaagtggaaagagatttttagagctggaaggattcttagaaatgatcaaaagtttgacagattcaagggctcaggtaacttgctaagatcacagaacaaacctttgctccagtggggactaaactctgtgtttcttgaagatggacacaggtaaatttgatccaaaatagcacttcaaagagaaacatacatggactgattgttttccacttttttttttttgagatggagtctcgttctgtcacccaggctggaggcaatggtgtgaacttggctcactgcaacctctgcctcccagttccagctattctcctgccttagccacctgagtaattgggattacaggtgtgtgccaccatgtctggctcatttttgtatttttggtagagacggggtttcaccatgatggtcaggctgatcttgagctcctgacttcgtgacccacccgcctcggcctcccaaagtgctgggattacaggcgtgagccaccatgcccagtttgttttccacttctaagtcccagatggttccttgtggggttatagaggggcttggaatgggaagacaagcaacatcttcctcctgggcatctacaggaaacttgattgcctctctcctccctaagggatcagtgttggctacccagccttgcccatgcctccacttctgcttagctctcagtacacagagggtggctgaagctggggccacagagggacacacagctgggcagctcagcactctcatctgtgcctcatcagctggggggctgtggtggcatgaagctggtgggaggctggcacttgcccatgattggagcccttgtgctcatcacttcatgagttcaggccgcttgggaacagcttgcttcaagtccacagacaggagcaaccctaactcagtctgccctgcaaaggtgggtacagcccctgatccacacgaactgctggaagaaaaatccaaagagaaagtcagtgaagacgtttgtagaaagaactgttgaagaaggaataagaaactgccatttttcctgtcagtgtctgctaataagtaataataaaataacaatgataactcataatgataatgatagtattattgagctcatgtgtaggcactgtattaagtaccattcattatattctttaatccttgcaacatccccatgaggcattattatccccattttacaggtgagaaggctgaggcccaagaaggttaagtatcacaagataaaccagctagtaagtggctgggttcctagagtggtgagtgtggctccctttgccagactgggaaacagacaccataagagccatcttccctccaaaagagggccagcccttgaccaagatggacaacagggttccacactcctgaaacccactgcttcaaccatcatggcatcagataagaaaccgacctagtctgatcctcttatttggctggcagctgtggcacctgaaggtctgagttcaacttctgccattaaacttctctgatgagcaaactgggaaaccaatgcatggggctcccacatagcactggcaagtgaacaaatgaacttgggacatatgtgctggggtccaggtcacaagcatgtcccttgtgggaggcaacatttggttgaatataagttcttaccacattctatggcccaaggctcccacttgccaaactctctggcataggtgttcccgtgggtcacaaatgacagacccaaccgcaacttccaggacatgcatgctttgagtgcacccagcagggggcatccttgcccttccactgcccaccctggaggggtgagactggcccactgcagggttgccctctacccagctcagcccaggagcccaaggccacatttcccaaacggggcattcatgtaactaccctgattttctctactattatttacataacatttttctttgtcaacacaaattttcaaacctaaatgtatttttaaaagcaaaaagctctttgatgaagattttccgctctcctgactgcctggattttctgcatttttggagctagctttgcaggaggtcaggatgtgagcaggagagtacaggcccccactgaagctacagttggggtcccaagaacagtgcaggcagtgacatcactgagtaaagatgggcaaggctttgttctgtggattcggagctggagatggaaaggaacagagtgaggagccctgaaatcctgaaatgaggagaggaggctgtccctttcctcctcaggctgagggggaggaatggactggtctctccaggcccaaagtggagagggggctgatggctacaggacagatgaaagggagggacttgggtgccgggaccagggcagccgcaggtgacaggtgcaggggctttgggaagggacagggatttcccttgcaaaatccattcaaacagatatcgagggaacctgatcccagggaggaacccagaacagcatgggctgccagaggggcccccagaagggccccagactggagggagggagagaggagagatgacgctaagggactgggggaaacgaggaggaagagtcctctgaattgttaccatttccaggaggcttggtcaggccctgctccggctccatcccccggccctagaattgctcttctgcagattatttctgtgctgggaattcccttagctccagcctccactgggcagtttattatcttaattccgcatgaagagtgtcctccctcaccctccaccctgccctggaccagacctccagccgcgacaattctagggcctgggtgagggtcttaccgttgttgggggtatgcaaagccccatgggggggtgacccagggcaaaaggccaggccccagaggggaaggaagtcttgggtagagctccctgcctcccaggctgggctaagaagggcgataagaggagcagattaggcaagaggaagtgggctgggctgagctggactggtgctgaactccctgggcctggggcagagtgtgggtcaggcacctgagcagctggggctgagcctggccaaccagagcagccatccctccgccccagccccgctgcaggctggggtacacagcagaggcgggcacacggaggagagaggagagcgcagtggaggcaggggctagggctgctcagtgggggtccaggcctcaggcagtcccagaggcccagaggtgggagtctggtgaggtgggtgaggggagtgattgccttgcctcatgtgcccctcattttctttctttttttatttttttcgagatggagtcttgctctgtcgcccaggctggagtgcagtggcgccatctcggctcattgcaagctccgcctcctgggttcatgccattctcctgcctcagcctcccgagtagctgggactacaggcgccgctgccacgcccagctaattttttgcatttttagtagagacagggtttcaccgtgttagccaggatggtctcgatctcctgacctcgtgatccgcccgcctcggcctcccaaagtgctgggattacaggcgtgagccaccgcacccgcccgcccggcaggtgcacctcattttcatgggggaggaagcattgagaaagaggagccgtgtgttcagcaaactttgcttattcaaaacactccattccagctgggccctgtccccaccccacccctgcctctacggtgctcccaacctttggggtcagatgcccatgctctggacccttcccctgaggaggtcctttctcctagtgagctccctgtgccttccctcagtccaggcctgggcagcagtctccccagctggtctccatgtcgtccttctccagccctcctgggccaaatctgaccagagaccaccacagggactgagaggccctggctccaaggcgacccggcctcatgaccacgtctccgctgtgagcagcgcagagaaggaagcccagagcaggaagtgctgagaggcacagggtggggctgggggtgggggcgggggcctccagaagaggcgggggcttcctgcttcagcctccttgggcagaagcagtgaccacaggcccccatggcaggcagggcgggtgggaggagggtgatttacaaggcagatgggcctctggctacagctcagtcctgcactcagccagggccaccccaggggctataagagcaactagatttctggagcagctcggggatgggtgccatttgagcccagcttggctccccctcctggctggcctccttcctgcccttctgcctgcctgtgtctgctgagattctgcaaagaggaacgcttggcaccatgtctctgctcaaccctgtcctgctgccccccaaggtgaaggcctatctgagccaaggggagcgcttcatcaaatgggatgatgtaagtggggcaggggcctcagctgctggagcaccaggtggtgggggccgggctgctacrgggctttgcttgggtgggaggattggtttatgtctcctaggatccaggcgcctgtgtggtttggccaggcagctgacaccactgcttggataaacaaacctgggattaagggtgtatgtccccagctaaagggctaagccttggttctaggtgtgagaagtgggtgagctgcctgggtggtcactggaggtagtttatttgggtctgcttctcttctccttcaaacccccaagagaagaggaggaaagtgcaccccagagctgaggcaggctaggaggagaggtgagctcgtccccgctcccagcacagatgtcttgcccttgctccggcagggcgctcagacccagctccttcaccccctccactgggcatcatcctgtccagggaagccttgctctcccctgcgctgctgtgggggcagccacaaaaggcccctggacctaagtgagaactagaggcttctgctcccagggaaggagctgatttgacttctgctaccccttgctgggctcagcattgctccccgatgcaggcctgtcagcaagggaaggggaagacactgctgcaccctgcagccctctctctgctgtgtctgttccttcctacacggggctgctcccaggctctggttctcctggcccctgaaaatgttaccttaggccagggattctcttaggctggagagaacaatatggagatyctccttcagggaggggaggctgctgggctcgcccagtctgagagttagagtgctgggcttgtcccaggaagggaaatgaaggcttggtrggggagggargacagcccttagtgctgacttgtccacctgatgggaggtgggatgagggggtctgggtctaggcccttcggggctgggctaggctaggggatctcgctgcccatgactatgggttggggccctgtggtgagatgcttcctgcttccctaggagtgatgtggggttggtgtagcatggcagtggcatggaggtgacatgccccaggagcctgtggaatgagggaagtggctcagaatgaaaagcgaagtggcctctctcagttcctctgggcagtgtgtgtaacctgactgggcagagggtcacagggtggcagtggaggtcgggggttggtggccagcggagactgtccttcttcctaagctggcacctgtgtacctggctgttcccttcccctctccaaggtagggcattggatgttctctggatcctgacctgcacaagcaagaatgtcccaagcctatccacaggtccatgctgctgtgagacagggctctgctttcaggctgcttttggcacagttagtggatggcatgggtgtgctgtgccatgttgaataagcagaatacataggatgtaagcaaatcccaactttatttcatctcccatggcctctttacaatatatttggtaggagaarctctccccctggccatggaaagaaactctgcaaggccacaagacattatatttactctcaggtaacacagtccagtggtcacttttcatcacaaaatccagtccgatgtcagaaactggctataatmaaaactccaacctttatttacactgacatcttctacccttctccttctaggaatggtttcaggtaggctgcaggccccctggaaagggccttggtgggattccctgctggtcctgctcaaggcccctctaggcatgagctatagggagggaggtgggaaaggggtaaccaagttctatttaaacaggtgctgtcataaattggctcatgctttctgagcctggcagaagcttaaagctgattctttctctggaggacatttttgaggattcttgggagacccaccccttcgaatgggaacctgttgcttgaagtccccccagcatttctattttaggggtcactcacaactatgtcttcagccccttcttaccaccttcagcttcctgtggctttaggccctttgcccccactctcccatgggcccaccctggaccccagcaaatacccatgcatccattgtcccaagggtgcaggcttgtccaacaggccagcaccccctgctctgcctcacacagttagctcgctgtagtccactwggtctcctgggcaggagtccgacctctgtctgttatgcctacaacttcaaggatcacaggggcctgttgtggggtggggggaaaggggagggagagcattaggacaaatacctaatgcatgcgaggcttaaaacctagatgacaggttgacaggtgcagcaaaccaccatggcacatgtatactatgtaacaaacccacacattctgcacatgtatcccagaacttaaggtaaaaaaaaaaaaaaaaaaaaaagagatcacaaaagctctctaagtagagttgaaacccctcactaggcttaaggtgggggatcaggcactccaactctcccttggggaggtaagggaatggagctcccaacacagctttcttaaaattggcttctccacaaaaattttcccttttccctgtactctaaccacctctgatctgagaacattttttggatcattcaccttgtaaatgctgcatttggtctgttttagtatacggcaactattgtgccttgctggaaaccttaattttaatatcttgttatgtacacatacaaagaccgttaaactaaaaggtagcctatgtgctctgtcagtgagtggaacaggactttagaaggtgagttcattcattcattcattcattcatttgctcattcagcaaacaccacattcaagtgccaagcaccaagcaccaagctcaaggtctagcacaggcttgttgtcctggagtccatgagtccctggggatttcctaggtgggcttgtargtctgtgactcacatccccccrgttactgtagcacatttcaggaagggttttcagaagttggggggcttgggttgtccttgaagttatttcaagcagaggagatttgggcacttaggtttggaggtgggaaggcttggtatctttatgggacagttgaatggacagggtaggaggtgttcatggagggaagaaggggcatatgggargttaggttgcatctggattgtgcagggccttggatgctggtgcaggagtttgggctcttggctctcgctgtgtcaatctctcctgggtggyagtaggsagtctcgctctatgagatgaggtaggggccaagatcctctttagggtctagagggagaatgtctatttgggctttagaggggaaaayccttctcttccagaaatggcatccccaatcctctgtccctcctggtgcttagctctagacaacaaaaggaaatgccttcagatttctgggatgggcacctcctgggaagataatgagctctgaaacccctggcctggaccagggaggcttggcctgaggtcttggaacaragtgctggctccttctctctgcaggaaactacagttgcctctccagttatcctccgtgtggatcctaagggctactacttatactggacgtatcaaagtaaggtgagaaaacccttgtgtgccatggccctggactcctgcttatcattgaggccagacagccccctggctgcaccaaggtggaggcatggatgctggggagtacagaatggcctggaagggtggctccagaggctcccctgtaggcaggggctctttgctctggaaaggaggatgcagtcactccaacctgtggctacccaaatgttccatccttagcatccctyggggagagagagagacaggcgaaagcactgctgctgaaggctgatgctctgcctgtggctgtgggttgacttggggctctgggagatgagagataggccccagcctctgggcaggaggacgggaaggggaagctgggaagggtccaggatggtggaggagacactgcaggctccagctccctgccagggaggaatggacagagggaaagggaggaggatctgcatgaatagagagaacctgggccataggaagggaagtttgggtccagctggccctgggcagcctggcatctagagagaggtgttggccaagatttgaagggtgtggaagctcccttctccctattgctyattcttgacctggactttttgtcccacatcccttctttgctcccaccgggatccgcaccctrcccccaggagatggagtttctggatatcaccagcatccgggatactcgctttgggaagtttgccaagatgcccaaggtaggtgtgtccagkagcagcccaggctcaagcacagctactagctccatggggcaagggcaggggtccctgtgsgggtgggaagcctgacttctgaagcacggggaatggttccttggctgggcagcaaggaccgtggctggaagccaaggaaggggagcggcagctcctgggctcgcctgggctctgagcttcagaactgcgcacagtgagctgagatggcagggatctgggaggaggggtcacctcctgcccctaaagcaccccagtctgtctgggaggggtggcttacacccccacccccggactagtttgcctatatttgcctaatgctggtaggaaaattggaggaagggattggtgggaagcggggtttcctgagactgggagctaagaatctatcttcaaacaaaagtggcaaccaacacacacaggactcccaggccggcctccccgcctgcccgccatcttggctaaccttttcctcagggcctctccttcccatcccagccgctggagtcagggacaggaagatgctaaggcctgtggttcctgggatggggatggggttctgcccagtgggccatagcccaagtggctgaggggagggccagagagagccacactgggcagggagggagcacacctccatcctaaccataccaccacgtgctgcagagccagaagctccgggacgtcttcaacatggactttcctgataacagtttcctgctgaagacactcacggtggtgtccggcccggacatggtggacctcaccttccacaacttcgtctcctacaaggagaacgtgggcaaggtgtgccagggagcactgggcctgggtctgggcccctgggatagcctggacttcctgagagacacaggcctgggcgggggtgctcaggagcctgaccgctgctctctgtggtcctgcaggcctgggctgaggacgtactggccctagtcaaacatccgctgacggccaacgcctcccgcagcaccttcctggacaagatgtaagtgccctctgcctggcctgagccctggtgctgagcatgccagccctgggccttgacgggctgctttctgcccccagccttgtgaagctcaagatgcagctcaactctgaagggaagattccggtgaagaagtgagccccccaacccctccccaggcttccaggggctccccaaagcctttctttctcaggcctgactcctctctgtacctggtacctttctctgccccttcagctttttccagatgtttcctgctgaccgcaagcgggtggaagctgctctcagtgcctgccacctccccaaaggcaaagtgagtggatctgcacccctgcccatcccccagcattcttgtccccaccagaaagcaacttggccaggaatggtgggtgggggagcagaggtgacatcacagccccagccaagagcctggagagccaatcaaccctggagctgctggttactgacactaggcacaggggtggagccagggcaagggagtgagaccctgagctccaagcaggtttgtctrtatcccctaccctgggtggtgggggcgctggggctgtggttgatggactgtgttcagggcaggcagcagaaacggcatgcattcccagtctagtgttgggaatgggagctgagcgtgaatgttttcagcctggaggagcgagataaggtcggcagtggcaggcggcagtctgcagggatctggaagtctgcagcgtgtcgagggagaggaactgaaccaaaggcggaagctgccaagatgcagacttctgctctgtacagaaaagcatttttccctgtctttttagttaaataattaatttttaattacaagttgtaagcagggtcaccccatgaagcaacttgtgtgaattacaaaaaggagccctctgggctgatatggccctgagctaggcttcaagcctggccaatggagcgaatctcagcccctgtccctgcttggccagtgctcttgtgtgggtcccagcctataccccatggagtattttctcctggtaagaatttggaaygttataaataaataaaaccacgacccccattgatcacctgcccacatgaatcccaggaggagcatttaccccacagccacagctctgcagagttggtgactccttgatgcagtcagtcacagggatccaaatgtggcgttggggagaggtaggaatgggctcctgcggctcccctacagccagcaacacttacctgtggtcagcacacatccaccctccctctctcctgcyrcctgagctcctcccttggctaagtcctccttatctatctgctttccttgtgtctcagtagaggctactgacccaactttgcttggagctgaagctccagagacagggaggggtttggggagatccagttagactctcctgctcagaccctctgctccaaactaagactgatgttggccttccagtgtgattctgaaagacatttaatgttttttttggggggggaaggaatgcaaaggtgcagaatccctgaataccacaaatgtacttttcatttctatttctatagatttgcctattctggtggtaaagtaaatgaaatcataaatatatgcttttcgatgtcaggctgtattcatttctcataatgttttcaaggtttatccatgttgtagcatgcatgagtacttcattcctttttaccacctaataatattccattgtatggatataccacattttgttcatctgtttatcagttggtagatgtttgggttttttgtactttttggttatgaatattcatgtacatgattttgtgtgaacatgtgtaaattctcttgggtatatacccaggggtggaattgttgggtcatgtggtcactctatatttaacaatttgagaaaccgccaaactgttttctaaagtgagagcattgtgtagggatttatttatttatttttgagacagagtctcactctgttgcccrggctggagtgcagtggcgtgatctcagttcactgcaacctctgcctcccaggttcaagcaattctcctgcctcagcctcccaagtagctgggattacaagcatgtgccaccatgctgggctaatttttgtatttttagtagagatggggtttcaccatgttggccaggctggtctcgaactcctgacctcaggtgatccaccctcctcggcctcccaaagtgctgtgtggggttttaggttagtcacatcccgctgacacttgtgattgtctgttttttgttttagccatcctagtgggagtggtatctcattgtggttttgatttgcatgtctctaactacaaattatattgagcaccttttctgtgtttattagtcacttatatatcttctttggagaaatacctgtccaaatccattgtccatctttcaactgggttgtctttttgttgacttatctcttatcggatatctgatttgcaaatattttatcccattctgtgggttaccttttcactttcttgatggtgtcctttgaagcacaaaagtttttaattttgatgacgtttaatttatctttctttgtcccggtgcttttggtgtctccaaatattattgttgaattgtcctcctttcaattctatcagtttttgttttatatattatggggttctgttgttaggtgcatatatgtttatattcaaattgcttctttttgaatatttgtcctccacttaaaaaagatagcctactagcctggcaagcagcatcatttcttctgacctcttttctacctcattctggttattcttagttccgatcctgccccagccaatggaatagccactgtacaaaatcagggtcagagcaaaccagctaagcatgctctctgctcagcaaccagggccttgagaagtggatgcttgggtgtccttgaagttcttctgtctgccttgagcccgccttctgaccaggtccccttgaccagggctgggccgagtttgtggttcttagctctgagaaggtgagggcaggggcaataaggttactatgcccctagaatgacgccatcaatcctgaggacttcccagaacctgtctacaagagtttcctcatgagcctctgtcctcggccagaaatagatgagatcttcacttcttagtgagtttcttgggttgtgctggtcatgggaaaagggtggtggctaacaatcccctcctcccacctgccatgcygggagtcaggaggcttcactggacaagggggttgtctaagcctccaggcccaagggatatggacctgtgctcttctctctggcttgaagccatgctaaggccaaaccctacatgacgaaggagcacctgaccaaattcatcaaccagaaacagcgggactcccggcttaactccctgctgttcccgccagcacggcctgaccaggtgcagggcctcatcgacaagtatgagcccagtggcatcaatgcacagaggggtgaggactaagggaaycccttgtcccctgtggtcctgtcctgccttggcagcggggttgtagcctgacagctatctcctgtcccccaggccagctgtcacctgaaggcatggtctggtttctctgtgggccagagaacagcgtgctggcccaggacaagctgctgctccaccacgacatgacgcagccactcaatcattacttcatcaactcgtcccacaacacctacctgacaggtgggccctgataacatyggtgccaacctctgctttcacaggggttccctgcatcctccacaggggttgcccacatgctgctggccctgagaataacacagaccatgatggagtggcggtagggggagagctgggctgcctttgggtgatgccstcacctcttccccatcctctggctcagccggccagttctcaggcctctcctcggctgagatgtaccgccaggtgctgctctctggctgccgttgcgtggagctagactgctggaaggggaaaccccctgacgaggagcccattatcacccatggcttcaccatgaccacagacatcttcttcaaagtgagaccctgggcacagaggctggtggccgtggcagtagggaagggctctgggccagaagctttgaggggttggagggctgaagctagagaagatgaatggctggaaggcctcagaccattggggaccagcagggattgggggccaatggcggccatscagttatatgtgtgtattgaaactaggcaggggggaaaagtgctatcacgagacaggcagtcggaacgctgaccttctgttcatggagtctccttctcctccaggaagcaattgaggctattgcagaaagygcctttaagacctccccctatcccatcatcctgtcgtttgagaaccatgtggactcgtgcgtatccaggcccattcagccacattctcacccagcccccagtctcctgtctgcaactgtcctccccacaactgccccagcctctaaccattgcctacagcttctcccacrtctcagtataatcaccctaaggcctcatgttctcctgctcgagtcccagcctccctgacctcctggcccctgatctgggtcatcaagggcacaaaaggatgcataatagggttggtgctgagcggctgaacccyatcccygcttttgctccccgcagaccccgccagcaggctaagatggctgagtattgccggacgatctttggggatatgctgctcacagagcccctggaaaagttcccagtgagtgggcttcgctgtgggacatttgagccttgggcctgggaacctggggcagggtgagaaccaggttagggagggagacactcccagaggatgctagggttcacttggttagatgygggtctgggatcctgtcaccttccgtgtgtcaggcactgggctgggcttcagggtatgctagtgacaaagacacagtcactgccctcaggtgtattaccctctagtgaggagacagacaagtaaccaggccattacaatccagtggttgttatgggagcacctggggagttctgatctggtcttggggatcagggaaggcttcctggaggaagtgatggacagggctcctagagtagcctgttaggtcctcctggtgcagatggccttgggccagggtcccatactcagggacagctacaacaagcacaagatgagccgcatttactccaagggataagctggatttatctcagtgagaatggggatgataagcagtagtgagasgcaggtcaagaggagtgggggaggccgagggagcatgcctggtaataaggagctcaggctatgccatgaaggtgagaagatggtgctgacctgctctccactccatagctaaaaccaggtgtccccctgcccagccctgaggatctcaggggcaagatcctcatcaagaacaagaagaaccagttttctggccccacctcctccagtaaggatacyggtggggaggctgagggcagcagyccacccagtgcccctgcaggtgagggcacaggtgagtcggggaggactatggtggggggtattaggagcatctggaacaggagaggggctggacctggaggagccatgcaggagccagtgccgacagagctgtatgtggcagtgtgggctggcgaggaagggactgagctggaggaggaggaggtggaagaggaagaggaggaggagtcaggaaacctggatgaagaagagattaagaagatgcagtcggatgaggtgtgtgggggtagccccaggcccctctgtgtcatcctccaccgttaagccccctggatgggggccttgggccccattyctgggctctgcaccatcctcctcttctttgccctcccctcttctccttagggcacagcgggcctggaagtgacggcttatgaggagatgtccagcctagtcaattacatccagcccaccaagttcgtctcctttgagttctctgcccgtaagttagcatgagtaacttacgggtgggtaagaagaagggggatctccccyttccttggacttggggccctgcctataaatatccagccacggagtcaggcaaagggcttgcttaagtggcagtggctcccagtttctctagtgaggaacttggcaccaaacagaatgctctggagtgtgtcggtgacaggctgggcgttatgacaggccaccttggctgggatggcctggggctcctgcagctgcctgcaggctctgtggctcccagggctgaactgtgctgtgggctggcccaagcccagaagccctggccgtgggacatgagacttcctgagagggagtggaggcagagaaaaccaccagagcatactgcccctttgcatgcttcccctttcatggacagcccggctgtttacctgtatcttctctggacacaagcacagtacgttgctctcactctctgcatgtcccatgcacgagcacctctttctgtctcctcctgtgcacagctggacttctgtagcactaacttctcatccctgaacccacagcctgcatccccacctgggtacactcatggcatgtactacagttaatgtgcccctctccccagacgtgttcagccatagcttacatacctcactccctgtgcacatcaaagcatgtgttcacatttcatgtgtgcacagcatgttactgaccccctaggctcagcctggcatgttccccataccctctgtgcccatctatggcatgtgggtctcactctccacatccatggcacacaccccacccctgtgcatacacactgagaacacccctcaccccagcaggcactgtgattcatacacttctcccagaggttggtccctaaacctcaggtctcagtggaaatgctggggtggaggcatctctataggccagagggagctgccccaaaggggaggccaagactgagggaggggacagcctgataaaactcctcccctccctttctcccctatatagaaaagaaccgaagttatgtcatctcrtccttcacagagctcaaggcatatgacctgctctccaaggcctcggtgcagtttgtggagtatccttgaggtttcagtggccagggtccttggcttgggtggggagccagaggagggcctggggacagggcccccaggktaagctgttaggttctcctggtgcagatggccttggctagggtcctaaactcagggacagctacaacaagcgccagatgagccgcatttaccccaagggaacccgcatggactcctccaactacatgccccagatgttctggaatgctggatgccagatggttgccctcaacttccagacgatgggtgagggcattcccaggcccctaagaatccttccctggtccctgcgccccccacctttacatccttgaggggtctttggaacaggctggggagtcctgctgttagtgtagactctgggagcatgcccaggtgcgtgagaatttgggggtagaaatgcattagcctgtgcccatgtgcctgcgcatacatgatggatgtaaagatgccaggctgccggcgtgggttctggccgctccacccaggtatgtctgtgggccacctgccccagctgccccagctcccaccacaggccctcagcctggctgtggctttcctccttgctgcctccaggctgtggaccctgcctaagagaggagacactgcaaggaaccagactgggacaggagaagccctcatcctcacggtccacccaacctccccattcaccagacagcaaaggctgggaatggaggaaatggagactgggcacagccccagggctgggccttcctcactgagtgtccttgtccctccagacttgcccatgcagcagaacatggcagtatttgagttcaacgggcagagcggctacctcctcaagcatgagttcatgcgccggccggacaagcagttcaaccccttctcagtggaccgcatcgacgtggtggtggccaccaccctttccattacggcaaggccctggggcacacaagtggccgggaggctgaggtcttgagtagaagggcacaggagcccacccctcactcaactcgcaaccccctcccctgatatcctggaaacttcagccccagccagttcctgcagtagcaagttgccttggaaactgcctcctcctcagcactggaggctgccacttggtccccatggaaaccaacgggaagggctgaggctggggtgggggaggggaggaagagtgggcagagtggggcagccggagccccaggtcctgggggaaggcattgttccctctttggctagggagggaggtgggaggcccacctcttcccttcatgctagaagcaccctggtcctcagagcttagctgtaacccgtgggctacacagcctctctactcatggccagagctgagtgaggttcttcataacacccaagaacgaatgcttcagctctaggcagccaggggccccagatgcttggggaagagcctgggtggggatttgatgctggttttcctgggcccctacccccaggtgatctctgggcagttcctgtcagaacgcagcgtgcgcacctatgtagaagtggagctgtttggccttcctggggaccccaagaggcgctatcgaactaagctgtcacccagtactaactccatcaatcctgtctggaaggaggagccctttgtctttgagaaggtgggggccagggcatggcagggcagagtctgtctagttcttggcctctacttacagacaagaggaagtaaacaaggcagctccttgaccttcctcctcctcctcttcccatccctcaccctgggccctcctgtttcaagagtgcaaaacccaagtttacagaagtttacttggtaggcagagtgtgtgtgtgtgaagattagaggcagaaatgtgcactcagggttgaggttcccatgggagtcttttgccccactggatacccactggcaaagctgtcaagggctatctgtgccaggccccctcagccttgggctgcaaatccagccctcctcccctgtgtggaaccagccatggcatgtgctgtggggatgtctttgtatatggcctagagtgtgccctctgtctgtcctcaccaaatctggtgacactcaccatgttctcacactgatgctgagacttctggagccagggagggggtcagcttggctcctctctcccctcccagcctgtcatgtccccaactctccccagatcttgatgcctgagctggcctccctcagagtggctgtgatggaggaaggcaacaagtttcttggacaccgcatcatccccatcaatgccctaaattctggtaaggagtggggtccttcactgttccaagatcagcagcaggagcctgtgcacagggtggggcagcttctgggagggggcctggagtgaggccttacctaagccctcacattgtaaggagtagggcagaacagtacctctccaggaacctaagagaggcgggaactctgcccacctaacagaattgctgtaattttctgaaacggctggggcagtttctcaagtagctgacacttatgggcatttmaaatttgctaagggcttataatacattctcacttcatcctcacaataaccacatgagtagacactcatcccctcttyatagatgagtaaagtctcagagagttaaagtaacctggctgaagtcacacagccaggatggtgcagtgccagactcagacccttgggtcctaggctgtgtgtgcacagtgctggcaggaacgggctctggctcactgcctaccctgtcctgtctcacagggtaccaccacctgtgcctgcacagtgagagcaacatgcccctcaccatgcctgcgctcttcatcttcctggagatgaaggactacatacctggtgcttgggcaggtaggagcccatggcatgccaggagcctcggggtgtctgttcccccttccttcccatcaagccagcttccagagttggggtgggatccagatggggcatcctggagtgggtgaggacaggggagacttccagccacatctccatatacactatgttgtaatgtcctgtgcacccacccagatctcactgtggccctcgccaaccccattaagttcttcagtgcccatgacacgaagtctgtgaagctcaaggaggccatgggaggtctgcctgaggtctgtgttgcctgcactgctgccaggggctcaccagagattagccctatttatgggagaggctggggagagggccgagtcccaggctcggggagagaggkctgtcaagccaccttcctgacctgctctccctacacagaagcccttcccactggcgagtccagttgccagccaggtcaatggggcgttggccccaacgagcaatgggtcaccaggtatgagcttcggtccgcacacctactgggggcacctccacctctgcacccacaggcacttccctttaaaaaatttcacctagggaaagtgcggggcagggggcacatactgcgactcccagggggcggtgtggaggaggcgaacggagccaaggggccccccagagcacctgccagcccagcccgtggctcttgcagcagccagggccggggccagggaagaggctatgaaagaagctgcgggtaaggcctgctgagcccggtgatctcggggatgagcctggggcgggtccggggctccttgggggttggacgggcaggacggcctggccggtgttgcgcctcacccgggcctccgcagagccgcggaccgccagcctggaggagctccgggagctaaagggcgtggtgaagctgcagcggcggcacgagaaggagctgcgagagttggagcggcgcggagcgcggcgctgggaggagctgctgcagcggggcgcggcgcagctggcggagctcgggccaccgggcgtggggggcgtcggggcctgcaagctcggtcccggcaagggctctcgcaagaagaggtaaggcycgtggcggtgccctgccctctgcagcgcgggtggcgcaggatctcagggcctgtccccacgtggcctccccaggagcctgccccgcgaggagagcgccggagccgcgccgggcgagggccctgagggcgtggacgggcgcgtgcgggagctgaaagacaggctggagctggagctgctgcggcagggcgaggagcagtacgagtgcgttctgaagcgcaaggagcagcacgtggccgaggtggccgggaggggcagggcgacaaccccaccagccccaccgaccccaccccccatggaccccattcgcccctctcaccgacccaaccccctcaccgactcccctccaccgacccccgccccccgyactccctctgaacaacaaagggcttctcgccaagcttacttcctctccctgcagcaaatctccaaaatgatggagctggccagagagaaacaggcggcagagctgaaggccctgaaggagacgtcggagaagtacgactgcctccctcccacacctgcttcgcctcccagcaagggctcagccgcacaaaacagctccttcatgcctgtctctctgcagcgacaccaaagagatgaagaaaaagctggagacaaagagactggagcggatccagggcatgaccaaagtmaccacagacaagatggcccaggagaggtgagccctgraggggaggcccagggctgggcagaccccacttcaggtggaaaggggcctctctacaaatggatcctgactcacttcccaaagatgcatctgtcccctggctctccaaaaagcggatcccncctgtcacctttgatcagagtgtcctcctcagacaaaacacggaggccmacactacatgggcagagctctggaggcagccaagcctgcagggagggagctgaggccttgggattgtagcctgtccactgtggtggcactgtttcccamggaaggacagtgtgttttgatggggaaatggttccctcagagggccccaggactcccagtggcccctacatactccttgggtccccacacctgcccccagctggttcctgccctatgttggatttctcatttgcctacatcctgcgtagacttcatgttaccctactctccctaggggttttctcccttttctaaaactccaattacaccaacaggttgaagagagagattaacaactcccacatccaggaagtagtgcaggtgatcaagcaggtgtgtaagggctgtgtccttcctaaacacacacacacacacacacacacacacacacacwcwcwctctctctctctctctctctcttcacaagtaggaaggggtggccccaggccctgactttgcccttaggagatgcactgcctagcgctgtccatgcagctggggtggcaggggacatcctggggttctggcctgtgtatggaggttggggtaccagcctgaagggatctgtctctggccagttctcatgtgtggaaatgatatgggctaactggcccatatcagggccaggggaggctgggactggcgagggtcaggggatgaagagggagtgaggaagcttcctgaggtgccaaggaataatggacctgaagctcccctagggatcattaaccacagaacacagctgccacctactgggtcctgacctgtgccaggcactctgccaggtgcctcacatgagctgtcttgtataatcttttacagtccagtgagacaggtgctgctatccttatcttacaaattttaaaaactacctaatgttaaggaatttgcccaaagtcttacaactagttagctgggattacagctggattctgacccagcttgcctgtctgtgttgtcctgattctctgccatccactcccacccagatgacggagaacttggrgaggcaccaggagaagctggaggagaagcaggcggcttgcctggaacagatacgggagatggaaaagcaggtaacaggttcactactgggacccccagcagaactgaatgggttccgggttgtaaaggggccttgccccagggagctgccagtgagagggtaggggaagggggccatcatccttcactgtggggtccygaggccctttcaaatgaggcagctctgcagatctccgcctggttaggatcccctttcctgagaggctcctgatgggctctaccactcccccaccctgcctctcaccccagtctcctgggagctccgaacatggatattgggcatctcctgttcccactgtccagggagcgagggtggccakcaggcccctcctgagccaggcaggggtccttgctgtctccacagttccagaaggaggcgctggcagagtacgaggccaggatgaagggtctggaggcagaggtgaaggagtcggtgagggcctgcctcaggacctgctttccctccgaggccaaggacaagcctgagagggcctgcgagtgccccccagagctgtgtgagcaggacccactcatagcaaaggcagatgcccaggagagccgcctctgatgcccccatcccactgggacatttagcaaggaggttcagccccttctctgggatgtggttctattcccccaggaaaaaggagccccagccttctgaggctgtgggaacctgtggctgccttggacgctgcagccccctcctcaacggccaggccagagtctgagacaggacccaggcaccctcacggcagggcctctctggggcctagaagtcttctcaagctgacttcctacctccccctccatctctagataagtgtcatatatttgttgagggcaaaagactatggactggaaggcagaaagtgggatcctggccccactctgcctttcctattgagcaaccagctctgggctcagtttcctcacctggagggttggacccactcacctccactctagccccgaaccctcctgccccaggcttccaggccccatcaggcctgccctgagttggccttgtccactccttgaggcagatcctggcactacctcacagctccctggggacggccactccctggctgagggccctcccctcccctctgcctgtccggaacgggaggctgaaatggaaaagctgccttggccctgcttggctgagtcacaaggggcagtgggctcttgggtgctgttccaccctgaccctggctcacccctcttcctaggcctgggggcaggcagttcctaccatgtacccctctcaggctgcctgcctgacaaggtcagcatcatttgctctcctgaatttatgaggtttatttatttttctctttcctactcctattaaagaacctcgtcccagtgtttcctgcttaagcctggtctctattctacaggtagaaaatgggggcagggtagtggagtgcccctgaaatgaaacgggctggggaaaaaaaaatctcttgggagctgaacccagggtgaggtcctttccagagtccagtgaaatggccctgcctctggacttgaagaggattcatttccccttctgctggccctgatgccacaatcactggaaaattatgtcaccccctcttcgcccccacacagatgtggcccttcattgtctccactctcggggttggagcagaagagctgagtgcaaagatgtcccctattttagggggagttccaaacttttaggcaatctaggcccctttaggaagacagagtggttggatgctcaggaccctatggcagctatggttgacctcaaaacttgctgtggaggggcttgtgggcagccactcactgcaccgatgacatgatcccaaatcccaaatagggacaggcactggcttaggaggcagagggggattgattctgggaagaggttgttttcttattagagttacagcacatgccgttagctgtgagcacctgttcctttggaaagtaaacaggtcctcctgcccccaccctgccatcccatccctctgggagtctgacctctgggattctaccaggccctggctgtagggtgaggtgagggggctgatcatttactgggctaaggcctagcattgatcagcctgctccctacatcattacagactggatacgctggggcagaccacctataccccagggtggtgccctatgttcaacccttctgccaggcactgggctgtaaaggtgaggattcgggcctagaggaactcactgacccaggcatgtgcacgtaagccagagccagagcccaatggagcccactgggcagcccccagattttgctgatgactgtacaggagaaggaaaagctgccttcccctcacctctgggccaggccacgcagagtctctgggctcccagtctggagctgggtagcccaggaatggggaaggcgatgcaatcctgcccccggagaggcctctgcatagcagactggggccttcccatgtggccaggcctagatacctgcctccctgctttcctcccaaaaaggcaaggtgtcccttaggcaaatgccatctctgggtcctggagatgaattagtctctggctgcaggggatgtatagaagaagagttgacgccttcccttggggtactggggcaggtgaaggacacctgggttccatcactgctgtgtatctatgggactggggcaaggctcccttcacgcatcatgcctcagtttcaccttttgcacaaagagaagggtccctacccctttcccaattccattgctgactcagactcgagtcccctgctgactcaccccgccccctgcatcccctgagcagccctctggatctcccagacacatgccaccaggcccaaccctgccaagctggtgcaacgtgacagcgtgagggggctggtgacacttgaggaaagaaggggcctgagagggaggcagttgcagacagagtggcagaccacactgaggcatcttggggagggagcccttctgccagcctggggcctgctgggaggacaggcccagcaggtgggacaggaggggagaggaggggaggtgagtatgacgtgcctgcctgccccctgcctgcctgggctccatctcctgtcagccttcagctccctaagcgacagcttctaattccggctgttggtgcctctgtgctctgcagcaaagtctcagctttttttcagctttgctgtttcttttctgttcagaacatactgagcccatagagaagtcagagcaaaggctccagggctcgagacctggcaccaccacccccttcctgccatgggaaccaactgctccttccaaagggtacccagcacagcactttctgccccaactcttcttccctggaactgtctcaatccaccacggaggaacaggaacagaaatgaagctcagttgtctcagggaggaggggctcttcaggaccaagaaagtgcccattctgggtttctgctgcttctctcctccacctgggggggtrtgagtcatggcttgtcaggctggtgggccacacacaggttccaggggtacaccctcctctgaccttggaaatagaagggaagaaagcaatttccctcacagtgctgaaaagagaagttgagtcataaagggaagaaaagcctttcttctgctgagtaaaggagagcattcctgcccagttactgggggtggagagtctctatccattcctgggggccaccccagaagggggccctagctctggggcgggagcagctttgagggctgcactctaaataactatgcagctctagaaaacaaaacaaaacaaaataaaaaaaatgaaataactatgcagctctttccctgacactttctaacttgttcttgtgtaaagcaggcagggctggtatttatcagtctcattttgcagctgagaatatgcaggcttggagccacactgctagtaaatgccttcaagctgggacttaacgctgatgtcagatctgtggccttttcatgacaccaggaaagaaaattggcagatccctgaccaaaggcttaacaaatgcaaaaagagaaaaggggggcttcgtagtggatgcaggtacrcatcacacgctcctcacgtgacagaggggagtgggagcctctgctccatggcctgggtgccaaattcaaggtggacatccccggagcctgggagctggagagaggcaaggggttcagggtgcagggccatgagcccactttgccacgcctatctatgcccagtacctttccccaggcatctcctactccaaagcatctgctcagactgagaacaccatcattcttcccttatttcctgtctctgataggaagggaccccttaaagcagccctcaatagtgtcccctgaaggtttatcctgcttccaagcctttgcctccagaacccgtctggaattacttccttttttttttttttttttttttttttttgacggagtctcactctgtctccaggctggagtgcagtggcgtgatctcggctcactgcaacctctgcctcccaggttcaaggaattctcctgcgtcagcctcccaagtagcagggactacaggcgcgtgccaccgcgcccagctaatttttgtatttttagtagagacggggtttcaccatgttggccaggatggtctcgatcccttgatctcgtgatccgcccgcctcggcctcccaaagtgctgggattacaggcgtgagccactgcacccggcctgggattccttccttctttcttttgcagccagatcccgcacatccttgaaggcctatctttaaaaggcccgagagccctctcctgcccacaactccatcttttcatccaaggactgtgttggtacgtatttagcagaagaattcagccctcaggtgacaacgtccattttttaagtcccagtgttgtcttcttaagaggtggaacgtctcgcacccagaaccgagattctgtctctctcttacccgctgccggcaacaaaatgtgcggctcatraaaagtctcagtaaattctgcagctgataactgctttactccttactttacaaatatccattccaaccctactcacaccctccccaccacccacacccaggctctgaggcgccctaactctgctccgcccaggcctgtgtatcatcccccctcctccaggaccgagggggacctgctggccggagggagaggagatgcagtggtttctccaagcatcttacggaaaatggaacttgtgctcgcctcctctctttaggggtcagccagtggtcagagccagagccctgtggcctgggggttgttttgtgctcaagggagaagcgaggggcagggaacctcgagtgggtccctagctctttccagggtggcggcgccagggaacttttaacatgtccgcggcactcccgggtcctaaggagcccctccctggtctgggcgtctacactctgcccgctaggcagccaccgggagctggcacgcgggcgcgttgtcggggttggagacgtctgaaattggagagcgcactcggaccccacccctcgttcccagggagcgtgtgcgggtggaacaattgtgtgtgagtgcgtgattctctgcacttcgagtggcagttcccagccaggctgagcgcccccaatccgcggcacgtataccccctcccccaaattactcctcatccgcctttcgctgccacccctagctcgcgcgtggtccagttctgcgctcatggggtcccaattcctttcaccctggaccgatgggggcagctttcagtcttccccgacgaggccgaggtcccgccagtttctaaggagccgagggcaccgactcggttgggggcggagggcggggagagaagactgcgactttgggattggcccggttgggtgcatgtggcccccggcgagcagcccccgcccccgccccgcaaccgccgccgcattcccaggggagcgcggaggaggaaccgctcccctacttcgtggcccacgaaggggtgggggtcaggagcggtctcccccgccccgtccgtctctgccctgacggcgcagtccgctcccaggacagccattgccatggagacccccaaggctataaagtcaggtatctaggcgggcggcagctcccgcgccgctgagccccccaagtaaggagcaagcgccctggcgtggcccggcccccgcgagaggggaggaggcggaggaacggcgccagcagcttgaggagcggcgcgccccgccagggctggaggcaggcgtgcacggcgggcgccaccgtcgctgcgggggagcgggggctgccctgggtgcgggtgagtggcacggcggctccaaaccacgaggactgaggggcgccggacaccgggaaagcggcgagagactcgggagagggtcgagtctctgctcccgacgtctggtggcgggccaggagcggagcccggagtagcgagcaatcaacacctccaggcgggaggcccggggaaggagcggcgacacgccaggcgtgcggcccaggagcggcggggcagtcggagcctccgggacagcggagtaggaacctcgggaccctcggctgcagccgcccacgcgcggagggagaggtatcagagcgcgggcggaggccggagccccgcggggcgcgagaacaggggcgcccccgtgcggaactgccaggctgcccgggcgcggcggccggggccatgctcaaacccaaggacctgtgcccccgagcggggacgcgcaccttcctggaggccatgcaggcgggcaaagtgcacttggcccgcttcgtgttggatgcgctggaccgcagcatcatcgactgccgcgcggagcagggccgtacgccgctcatggtggccgtggggctgccggaccccgcgctgcgcgcgcgcttcgtgcggctgctgctcgagcagggtgctgcagtgaacctgcgagacgagcgcggccgcaccgcactcagcctggcgtgcgagcgaggccacctggacgccgtgcagctgctggtgcagttcagcggtgaccccgaggcggccgactctgcgggcaacagcccggtgatgtgggcggcggcctgcggccacggggcggtgctcgagttcctggtgcggtccttccgccgcctaggcctgcgcctcgaccgcaccaaccgtgcggggctcaccgcgctgcaactggccgccgcccgcggccacgggacctgtgtgcaggccctcaccgggccctggggccgcgccgccgccgccgctgcggcccggggctccaactccgatagtccccctggccgcccggcccccgcggccagccccgagcatcgacgacccagcccccgccgcctcccgcggcctctcctggcgcgctttgcgcgagcggcgggcggccacggcggcgaggctggctcagcgggcaagaattcgggccggcaccgggcgcagggcagcgaacggcccgagctgggtcggagcatgagcctggctctaggtgcggtaaccgaggaggaggctgcccgcctgcgggctggggccctgatggccctaccaaactcgccccagtcttcggggactgggcggtggcgctcacaggaggtgctggagggagcgcccccaaccttagcgcaagcccccattggcctcagtccccacccggagggcggccccggctctggccgcctgggtttgcgccgacgctccacagccccagatatccccagcctggtcggggaggcgccagggcccgagagtggcccggagttagaggccaacgctctgyctgtctcggtgcctgggccgaacccttggcaggcgggcacmgaggctgtggtgctgcgtgctcagcggtaaacggcgccaaggcccgaggcctgcttcccctaccctcccgtttctactccactggtatttctctcttctaggtccctcaccttttcggcagccgccccccgcagtccattttggaacctgcctccctgccaaggcgagacctccaccagccctccaccagaaataagggacctccatcttcttttttgtgctcctcggtattccctgcctaggtctagaggtgtcgattgattggttccgtaggctacagccaggaaggtggattccccctccccagccctcaggctcaatcctgggtcggcctagccatctgtcgctcctgtccggcccccctcccctcgctgggtttcccaacaactgggcagccaggtaaatagaagggtccaccttggagaataaggacccagcctccccactttctgcctactgatgctgacaataatcccacaaactaccaaagtctcctttccctccaagtgtgggagaaggaaaggacggagggggccctagagcctttcaggactggagggctgaggaggaaggggtctggctgttatgtttttccagggtagaaactcctgtctcaagacaatgaaagcatattttgggagtgggagagtccctagtgttgaacaccagttgtcccttgaatcagctcctgggtaactccagctccctctctctctgccccaggattcagcttcattgataatgtggagtcactgctccacacaacccctacccaggccaactccgggctccggagccagcccgctcttcagctcagatgcatttgaattccatcatcgaggttcaacacctcacccctggaggcccaagccctatttccgctgggtcacagaggcctgaaatggaaaggactgagcgcttccccgcctccacgcctcccagctcccccgtcccgcacgtgggtgctcccgcggggtggaacggttgcgaaggctgtgcttaattgtatttcttccaatcctcaaagaactcgtgttttaagcctttgtatatgaagcagaaagcagcgggtctgattccgaggcttaagagcctgacaatatctctttaaatagaagctccgcgagggggataattgactaaagtgtttgcgacgtgaaacggcggcgcgcgggagtcgggagcccacacgagctgcgggtccaggtttaaattatatcaaactctggcgagagctggaaggagcctgttaaacggctcctgcttctcgctgggccgttaatggagggcagggcggatgatggatgctagagttcgagacccgggactcctgccttggtcctaccgcgtgggacgcaggcccggcccagttttattactgggtagatgagtaagtcagaggcaaccgcagagaggtggtcagaggccctttcctgacactgtcctttgtcccctgcctgctcgcccccaccctcctgccctatactggcctagcgaggcggcggggttgggggcgggggtccggcgggacgggtgcgctaggaccttgcggaagcgcyagcacgtgtgtcagtgcgcctggcccgcggggaggcggcaggtggggctcttttgtgaaccctgagggtggaacttgaagcctttcacctgcctgcagtaaggtctttgcaagacttcgatctgtttgcctttgcagtacggaaggtttctcgccagcaactcccagggaactgcccagagcgagaatgtgccgagatactgctgggcctggcggtgaggggtgggcggccaggagtgggcctcgtgcaggtgtcaggacacctatccagtccttgccctccgcttgcccccatccgctaggccaagcaggccggcgcactggacgtgatctctggtgccccctggtggcagcgctgggccctccccgctgcgccccggctcggagctcagacatcctggttttctttgggatcacccctgtgtacttcttcatccatgtgcatttatcgtggaatcctcttcctcttgtagaatattaaatccggatacttgaagtcactttacagcagtgaagtgagggacaatgaacaaaaaactcgcattgagagtagcaggagcccagacccttcaataaggaccccaagttaaatcttccaagttaaggctgagagctacagctctcttccgaaaagctggagctgccaacccttcccttgggacctgccgattatgcagttttcttctgatactagctttggtttctgaggtattctgccctctccctcccctcttctcccaaaacatctgcctctcctcagtccccgtctgggtggtgggtgcacaataccaagtgcctgaaaagcctgagagagagggtctggggtagggtggggaccactggacaccccaagtgcaaactgctgctttctgacccttgcttgcttatgtactcccttttcaactgtgttgaattttaatgacgtttttagtggtgtagaaatgcaagtattttggcttaacagcatgaagtctgggttgcacattgtatcagaggtgctgtaatctttccagtatctctgatatacggctttctggttgaatgtcaccctgggccctcttgactggataaacaaccatgagggctcttctctgtggagctgccgagagcttggtggtagaaagcgatgtttctaaacaactgcagcggctctttcctgtctgaactgcatcgtgtgtctgactgccttgctgtccatacatacagactccttcccaggcccggctctgtgcagaacttccatgttttaccacatttttctctcctgaactccctttgtcagccccagggtgttgaggctgggtcctctctagcaatctctaccttcagaagagacttttctaaatattttgcttttccagttcttgttgcttttgtcattgtgaagagtcacccaggatgctggcgcttggtaccctaagatcagaagtggtgtgtgtgtgagctgtgagacatgcacaccctttcagagtgatactgtgtggtggaaggactgttagaactcaaagaatagttaataaatccagtgtattattccgttgcgagaactggcctctctttgccttatcaagcactcctgaccctcggctccctttggagagatggaccgagcctttgcctcctgtggaggcccc

SEQ ID NO: 95831 - DNA, 149879 bp, Homo sapiens
taccttttctacttcagaggaccccatcaagaaagtaaaaaaacaacctatagatgagagaaaatatttagcaatcagagatctgaaaaagaacttgtatcttgaacatgtagagaacaattacaacttaaaaagaaaaatccattgtaaaaatgggcaaaagatttgaataaaactttcttttttccttcccttccctgcccctccctccctcctttctttttttttttttttttgagatggagtctcactcttacccaggctggaatgcagtggtacaatcttgactcactgcaacctctgctgcccacgttcaagtgattctcctgcctcagatgtccgagtagctgggactacaggtgtgcaccaccacgcccggctaatttttgtatttttagtacagaccaggtttcgccatgttggccaggctggtctcgaactctggacctcaggtgatctgcctgcctcagcctcccaaagtggtgggattacaggcatgagccattgtgcctgccgctttcttttttttttttttttattttttgagtagggtcttgctgtgttgcccaggctggagagcagtggtgcaatctcagctcattggagcctccgtctcctgggctcaagtaatgctcctacctcagcttcttgaatagttggaactacaggtatgtgttacactcctggctaatttttgttttttttgtagaggtgaggttttgccatgttgcccttactgctctcaaacttctgaacagaagccatttgcccacgttaccctgccaaattgctaggattataggcgtgagccactgcacccggcctaaaccaattctttttttttttttgagacagagtctcaccctattgcccaggctggattgcaatggcacgatcttggctcaccacaatctccgcctcttggttcaagcaattcttctgcctcaccctcccaagtaattgggattaggcatgcgccaccatgctcgactaattttgtatttttagtagagatggggtttctccatgttggtcaggctggtcttgaactcccgacttcaggtgatccgcccgccttggcctccaaaagggctgggattacaggcgtgagccactgtgcccggcccaaaatgaaccttttattgtagtaactgcaaactgaaattctgcagaagtttgaaacagtatcagtggattgggtttaagtaactggtagtgacagggactcaggtgagcaggaaagaagtgggcaggtatactgtgcctaaagggtgaagctgtggttcacttccatttcgctgttgcataagcgttgctagattgtcctagttttcaagaaaaaaaaactcaaaacaaaatcacacacctgaaggctggttatggacagagaccagtttctgtcccttgctttaatgcttaaaatgcatgtgcatcccgtttatccccagctgaatgcacttgttctttacctgcctgttttccctggaatctcagataacaatgagggtggtggtaactatttcctcagtggaattggtggttggtgggcacagccttatggttattattattcatattgttgccatctctgctacatctgagaaacttttttttttttttttgaaatggagtctccctctgtcacccaggccggagcgcaatggcgtggtctcagctcattataacctccgcctcctgggttcaagggattctcctgcttcagcctcccgagcagctgggattacaggtgccagccatcgcgcccagctaatttttgtatttttagtagagatggggtttcaccatcttggctaggctggtcttgaactcctgacctcaggtgatccacccacctcggcctcccaaagtgctggaattactgacaggtgtgagccaccacgcctggccctggccctttttttttttttttgagaccctcattgttaatattcactgtatgcttgaaaaatgattgaaattctcagtttaatagtttaagctttttctttctttctttcttttttttttttttgagacagagtcttgctctgccacccaggttggtgtgcactggtgcgatctcagctcactgcaacctccacctcctgggttcaagtgattctcctgcctcagcctcccgagtatctgggattacaggcatgtgccaccacgcctggctcattttttgtatttttagtagagacgggatttcatcatgttggccaggctggtcttgaactcctgatctcaggtgatccaccgaccatggccacccaaagtgctaggattataagcatgagccaccgtgcctggccacaacagtacaatttctttctttcttttctttttttttttttgacatggagtttcactctttatgcccaggctggaacgcagtggcacgatctcagctcactgcaacctctgcctcccgggttcaagcgattctcctgcctcagcctctcgagtagctgggattacaggcatgcgccaccatgcccagctaattttgtatttttagtagagacagggtttctccatgttggtcaggctggtcttgaactcccaacctcaggtgatctgcccacctcggcctcccaaagtgctaggattacaggtgtgagccactgcgcctggccaatagtacaatttctaagacgaggaagtcagcattgatacaatactacgaactacattaaaaaacttatacaagtgtcgtaagtttttccactgatgtccagtttctgttccaggttccctcctaggactccacattgcatttacttgttatttctccttggtgtgtaggtctgtaagggtccttgggtctttccttgtctttcatgaccttgatggttttgaagagtattgatcaattattttgtggtaagtccctgaatttgaaatagtgtggtgttttttcatgaatggaatgtggttatgaattttggtaagaataccacagaaattatgttgggtctttctcaatgcaaaatatcaaggggttcaggacgtaaacatgtcttattgtttaccttaattggttggttaaggtggtttctgctgagtttcaccactataaagttactgtctttccctttgtgctaaaatgtatcttgggtgagacactttgaatctgtgcaaattctgtttcatagcaaatttttaaccactaatttagcattccttagtggatcttgtctgcagcagtgattgctgaagtgtttgtctaatggtgagttttgttatccctcattccttccacatttactaaaatcctactctaagaaagcattcttttcttctttcttctcttctcatttatttatattagtatttatatcagatatttacttatatcggcatgaatattaaaattaatatatatgggtcatctgtggttcatgatccaatgctattatgatttactttgttgccttggccattaggagttctttcaggttgccttctgtggtttctgtttttttttttttgaaacagagtttgcagttgtcacccatgctggaaactttgccatttctgcctcaatcctgctacataattcccattccttcccttcttccattctcctcatgtaagaaatcaatcacattagttcctggttaaaactttttaaaaaaattttgtttgagatggagtctcgctctgtcgcccaggctggagttcagtggcgtgatctcggctcactgcaagctctgcctcccaggttcacgccattctcctgcctcagcctcctgagtagctgggactacaggcgcctgccaccacgcctggctaatttttttgtatttttttagtagagacggggtttcaccgcgatagacaggatggtctcgatctcctgacctcgtgatctgccagcctcggcctcccaaagtgctgggattacaggcgtgtgtgacaaaattgtgtagcatttgcatatcacctacacatcctcccatatactttaaatcatctctagattacttataatacccaatacaatgcaaatgttatgcaaataattatagtgtattttgaaatgagttattatttattttttgaacatttggtagaaatggggtcttcttttgttgcccaagccaatctgtaactcctggcttcaagtgacactttggctcagcctctcaaagtgctggggattacaggtgtatgccactgagcccagcctattttttgagtatttttgatttgctgttggttgaatccacggatattgaacccgcagatataagggccaattatatatcatacttttgcctttaagcattttttttttttaaagacagtcttactctgttgcccaggctggagtgcaatggctagatctccgctcacggcaacctccgcctccggggttcaagcgattcccctgcctcagcctcctgagtagctggggggattacaggcgcgcgccatcatgcccagctaatttttgtatttttagtagagacagggtttcaaggttggtcaggctggtctcaaactcctgacctcgtgatctgcctgcctaggcctcccaaagtactgggattacaggcgtgagccaccgtgcctggccatgcattcaagcaaatttaactcttggttttttttcttgaggcagagtctcgctctgtcccaggttggagtacagtggctcagtctcggctcactgcaacccctgcctcccaggttcaagagattctcctgcctcagactcccgagtagctgggattacaggtgcccgccaccacgcccggctaatctttttttttttttttttttttttttttcagtagagacgaggtttcaccatgttggccaggctggtctcaaaatcccgacctcaagtgatccacccgcctcagcctcccaaagtgccgggattacacgcgtgagctaccgcgcttggcttgcaaatgtaactttttttttttctttttgagatggatttttttttttttctttttgatacggaatttcgctcttgctgcccaggctggagtgcaatggtgcgatctcggttcactgtaacctccgcctcccaggttcaagcgattctcctgcctcaggctcccaagtagctggactacaggcacccgccaccacgcccggctaatttttgtatttttagtagagatggggtttcaccatattggtcaggctggtctcgagctcctgacctcaggtgattcgaccacctgacctcccaaagtgctgggattacaggcgtgtggcactgcaccctgacacaaatttaactttttaaaggtcagttaactcagcacaagaaggctacttgatgaccttaataaagtactttttagttaaatgctaagggccaggttaaaatggattaaagaatgagacccaaaggaactgaattaacagcatatttaactttcagtaagttctaattcttatctacacctaggccttaccctaggcaattctcaccacacatcctggtagttgggtcgattacatttattatgttgtcttttttgtagagacggggtctcgctatgttgaccagtctaatggactgctctgagacgtttggcctgaggtgatccttccaggcaggaggatcacttcaggccaggagactgggaaccagcccagtagactgggcaacatagcgagaccccaagtttagtaaatgtgggtggcagtggactcaaattgtagaattggcacaggtaaaagcaattattcgcttttcagaggcacactgtgtggatgtgagaacaggctggcatttccgataacaggtctgcgtgttcccaagtccttgtatcccacaaccttcacgtagacatcttatctaactatgctgtcctacccaacctatagcgttcttgctcccagagtctaaatgggagccccaaactaattactgtatagtagtcgaactacacaccaggcacttccccgacaatctacaaccccatccaaaggggtcagaaactagtaacaaaataccagctgcgagcctctccttcccctaaagagatcttatcaacttggctgcaccttcccacctctagcctgcgggaacaaatatcccaggatcccgggcggtttcgattgacgttacttccgggaaaagtaaccttgcatcggcggttgcgggcctggaaagctctcgcgacattttctcctgcgagatctgcttgctcactgtagcgatgacaycctcctcctcctccccgccgcctttcggcaatcttcgccagtcccagtcccgactaatctgtactcagatggcatggatcagggtctcccctcgaaccccggttcgcacggggcgtcaggtggcagcggcggggtgcgagctgcgcgaggccgacggcagcggcactacgggtggccacgggcaggcgacgagcagtgagtgtgggcggggtgggggtaagccacccgtgtagcggctcgattgttctggcctggctatggcgcctctcctcccccccgccatggctccccgtgtccctgctccgctcctctcagtgagtgaaagtggccgccgccgccgccggcccagcgcccgcagccgcctcagcgccgccgccatcttggggtcccaggagccgcggagggagcgagctaggagcgtccacgcccaacgcagtcaccgtcccacggcctcagagagcgaaccgcggctccaccgtcggcggggcgacccccccctccggaccccgcccgcaccccgccccccctccgccgccgtcgcggcggcggggccaggcggcccgaggtgaggcaactagacgtgggcgggcgaacggagtgggggttgtgtaggtcttgttgcgcccctctctgcgggcgacaactgggccgcgtcttaaaggggccgtcgcccccggcccttggatttgttggggttagtatggaggatgggtgtggacactccccgcagggttgggacctcagggactagggccttgtccttcccgtttcatatctctggagacccggggtcatgcggtgacctcagccacctgaggaagcccgtggggcgcccacacgtggggagtgtgttagaccaggtgcacgtgggacccggtggggcggtgtcgggctaacacgtgtgtaggtttgggggtgggcaggggcagggcggaggctggaaggccttgagtgggaaccccgtgaaggttgtgtatctgtcattttaaacaaatgagatctaagggcttgttagtgtgtcattttgtaaggggcaagttgagatacggttgaatggtgcacgctgctggctggtgttgggtgggggcaggctgacacctgcatagacttgggagtgtctagatgacacctcttctggttttttaggtttttacatagcgactaggaaagtgtcatcctattttgacattccttcttgagctcgctaatggaaagtactacttccgtaatctccgaggctagaagccccctacagtttaggaatgacagaacctaggcagccacttactattctagttaacagccaactgtgcctggaattctttgattcacacactgtctctagtttgatgtacttgttagaaatgggggaaggaatttggaggttgacctggctaacgtcacaggttacttttccagtcagtgactttcattatttcctccacaacaaaattattgtggcttttcagtggcaacttaaattaaataatagctttattgaaatatgattcaaataccaaaaaattccgctttctaaagcgtataattaagtaattttctgaaactatatttattaaattctgtagccatcaaccactatttaattcatcaccctaaaagagaatctctagaagccatttagcagtcactccccattccccctccctccagtctyaggtaactattaatatattttttgcctaaatttacctaaaaaagaaacatatgtatctttctttgcctagtttgtttcacttaacatggtgttttcaaggttcatccgtgttgtagcasgtatcagtacttaattcctttttttttttttttttgagactgagtctcgctctgtcgtccaggctggagtgcagtggcggggtcccgactcactgcgacctccgcctcccaggttcaagcacttctcgtgcctcagcctccccagtagctgggattacaggcggctgccaccacacccggctaatttttgtatttttagtagaaacggggtttcaccatgttggctaggccggtctcgaactcctgacctcaagtgatccgcctgccttggcctcccagagtgctgggattataggcatgagccaccgcacatggcctcatttgcttttaatgccaaataatattctgttctagttgcattttatgtttgaaatttccaagctcctcctcctataaaacaatttgagatcattatgtgtggtaaaagttgcataccttctagactttaaaatgaatgtttttttttttttgttttttgagacggagtctggctctgtcgcccaggctggagtatagtggcgtgatctcggctcactgcagcttccgcctcccgggttcaagcaattctcctgcctcagcctcctgagtagctggtattacaggcgcccgccaccacacccagctaatttttgtatttttagtagagacggggtttcaccatgttggtcaggctggtctcgagcccctgacctcgtgatccacctaccttggcctcccaaagtgctgagattacaggcgtgagccaccgtgcccggctgaattttgtttttaagggattgaattccatcattttagcttactgtgttcttttcctctacgttttatttcagtagaaaccaaatcaatttttgaaagtctgtaaattgtgataggaaataattgtagtgagcacaaatgtgattagaaaagtttatgactaataaaaacattttgagtacatcaaggtggaaatgtgattaagccaaagcaacaaatcgagagctattctgctgggcatggtgtctcaagcctgtagtcccagttactcaggaggcaagaggatcacttgagtccctagtgagctatgattgtgccagcgcactyaagcctgggtggagagcgagaccctgtctctaaaaacaaaacaaaactaattataagctgtggtgttagaggttcacttaatgaaagtttgttggccgggtgcggtggctcacgcctgtaatccctgcactttgggagactgaggcaggtggatcacctgaggtcaggagttcgaaaccagcctggccaacatggttaaactctgactctaccaaaaatacaaaaaattagctgggcgtggtggcgcgcacctgtaatcccagctactcaggaggctgaggcaggagaatcgcttgaacccgggaggcggaggttgcagtgagccgagattgagccactgcactccagtggagtgcaacaagagcaaaactctgtctcaaaaaaacaaaacaaaacaaaactggctaggggattttatatgccaacatacaaattcacattaaataggttaggcttggtggctcacacctgtaatcccggcactttgggaggctgagcaggcggatcgtttgagctcaggagtttgaaatcagcatgggcaacatggcaaaaccctgtctctacagaaaatacaaaaattagctaagcatggtgatgtgcacctgtagtcccagctacttgggatgctgaggtgagaggatggcttgagcccaggaggcagagattgcagtgagccgagatcgagccactgcactccagcctgggcgacagagcccgagctggctcaacaacaacaacaacaaaatacacatgaaatataaacgctaggatgcagtggattttagagtggacaaagtgggttggggttaataggagactaagtttttgtaggaaaacagttgaaaagtttttttttttttttttttttttttttgagatggagtcttgccctgtcgccaggctggaatgcagtggcacgatctaggctcactgcaccctctgcctcccgggttcaagaaattctcctgcttcattctcccaagtagctgggactacaggcgcatgccaccacgcctggctaatttttgtatttttagtagagatggggtttcaccatgtttggccaggatggtctcgatctcttgaccttgtgatctgcctgccttggcatcccaaagtgctgggattacaggcgtgagccactgtgtccagctaacagttgaaaagttttaaagttggatctaacgtatcaaaatcttgatatgataggctatagcatatagagaatgagaagggcataggcactaatatcagacaactcttgtgagtcagtgagtatggtagatactttatatattatcattttaattttcttgaaacttcttggtagtaattctcattttacagatgagaaaattgaaaccaagttaaatcatatagccagtaaatgacagaaccactattctatttttgttatagtccttctgccttccccaaaaatattttgaagagtatttttggccaggcgtagtggtttccacctgtaatcccagcactttgggaggcagaggagggaggatcacgtgagcttgaggagcttgagaccagcctggtcaatatagggagacctcatctctacagaaaataaaatttttggactagggtggcgtgtgcctatagttcagctacttggaaagctgagatgggaggtttggttgagcctggaaggttgaggctacagtgaaccctgattgtgccactgcactccagcctgggcaacagagctattccctccagagcaaggttcttaacattttttaatgtatcttggacggctttgtagtctgaagacacctattctgttgggtaagaggttttttttttcctcctccccgcaaaaacgtttttttttttcttgagacagagttttgctcttgtagcccaggctggagtacagtggcgtgatctcagctcactgcaacctccgcctcccgagttcaagtgattctcctgcctcagcctcccgagtagctaggattacaggcgtgcaccaccacgcccggctaatttttgtatttttggtagagacaggatttcaccatgttagctaggctggtttcaaactcctgacctcatgatccgcccaccttagcctcccaaagtgctgggattacaggtgtgagccactgtgtggcctgtttttgaaacttcttagtgaataagatggttaaggcttaagaacagaccagaccattaaaaaaaaaattcttttttttgagacggagtctcgctctctcgccaggctggagtgcagtggcgccatcttggctcactgcaacctctgcctcctgggttcaagcaattctcctgcctcagcctcctgagtaaccgggactacaggcatgtgccaccacacccagctaatttttgtatctttagtagagatggggtttcaccatgttgaccaggctgatctggaactcctgacctcaggtgatttgcctgcctctacctcccaaagtgctaggattataggcgtgaaccaccacggctggcctattttattttttaagcgttaactattctttatttgatattacacataaaccacaccctaaagtgcttttcagtaagtaaaaggaaccattttagttacaaggaattctaattagcttggcatagttaaggccaaaaatgtagacattgctgccttatcttcagcccttgcctttaagaggcaaataaacacaaaacacaggtgaattatgcttggttctgagacaatgaaggaattttgccagtatttaaatatgctcacataaccagttatataaatctaaatataaaatcaatctccagtagattttaagatggcattcaccatcttgatgaaaagttgaacattactaatgaagttcaatcatgtttttagaaggggaaaacagtgatatcatttacttaattggaattactgttaaaataaaaaaccaagaccttcatggtagctcacacctgtaatctcagcactttgggagaccaaggcaggcaaatcacttgagtctaggagtttgagaccagcctgggcaatatgccaaaaccccatctctacaaaaaattagccgggtgtggtggtgcatgcctgtagtcccagctactctggaggccgaaatgggaggatcacctgagctcagcaggtcaaggctatagtgcgctgtgatcctgccactgcactccagcctgggtgacaagcgagaccctgtctaaaaaataaaagaggccgggtgctgtggcttcttaaatctgtaatcccagcactttgggaggctgaggcgggtggatcatgacgtcaagagatcgagaccatcctgaccaacatggtgaaaccccgtctctactaaaaacacaaaaattgggtgagtgtgctggcacgtgcctgtagtcccagctacttgggaggctgaggcagtagaatagcttgaaccctggaggtagaggttgcagtgagccgagatcatgccactgcactccagcctggcgacagaggggaactccatctcaaaataaaaataaaatccagaaagccaaatatattcatttaaccacagccagttttctttttttttttttgagacggagtttcgcttgttgcccaggttggtgtgcagtagcacgatctcagctcactgcaacctctgcctcccgggctcaagcaattctcctgcctcagcctccccagcagctgggattacagccacccatcaccacgcctggacagttttttttttttttgaggtggagtctcgctctgtcgtccaggctggagtgcagtggtactatctcggttcactgcaacctccatctcccaggttcaagtgattctcctgcctcagcctcctgagtagctaggactacaggtgtgtgccaccatgcctggctaattttcatatttttagtagagatggggtttcaccatgttgaccaggctggtctcaaactcctgacctcaggtgatccatctgcctcggcctcccaaagtgctgggattacaggtgtgagccaccgcacctggcataatttttgtatttttagtaagatagggtttcaccatgttagccaggctgatctcgaactcctgacctcaggtgatccacccgcctcagcctcccaacctcccaaagtgccggggttacagccatgagccactgtgcctggccagacatttctattttgtaataaatacggcagtggccaattactcattagtactttttttgaagtgccttactctgtcgcccaggctgtagtgcagtggggcaatctcagctcagtgcaacctccgcctcccgggttcaggcagttctgcctcagtctccccagtagctggaattacaggtgcccgccaccatgcctggctaatttttgtatttttagtagagatggggtttcaccatgttggccaggctggtctcgagctcttgacctcaagtgatccgcctgcctcagcctcccaaagtgctgggattacaggcatgagccactgtgcctagccattagtagcttttttgaggtaagctatcaaatctgccctttctaccttattaatgctggcaaagataatttttgttccaggaatagacttcttgggattctccaaatactgtatcagtgtatcctctccccaggcaatgctttttttcttattggcgtctgtgtaagtgaatccaacagcctgacctgtcttctttccaaagagaccgtggagatttggcccagtcttttgctggcctccctcttccatgatgtggcactgggcgtgcttctgagcacacatattcttgtttttcaacatcacccttatttaattatctgttttgtacaaaggttccggttctgaggatggacgtcctgctctatcagtgtctactttatagtgttgttagatataaatgaggcaatccatgtgacgtacttagtaccattcctgatacataatgtttaataaatgctatatatgattagtcgaattgaacccccattttacagtggaactagtgagacccagagtgagtagctgcctgtcctagtctatttgtggcttttctttttttcctttttttttttttttttttgagacggagtctcgctgtgtcccccaggctggaatgcagtggcgagatctcggctcactgcaagctccgcctcccgagttcatgccattctcctgcctcagcctcccaagtagctgggactacaagcgcccaccaccacgcccggctaattttttgtattttttagtagagacagggtttctactggtgttagccagaatggtctagatctcctgaccttgtgatccgcctgcctcggcctcccaaagtgctgggattacaggtgtgagccaccacgcccggcctatctgtggcttttcaatggattcagctcacagctcttgacttcatcttctttcttaccatgctgtttccactgaaagttgtatcatttaattcagttaaagttactgcttgataaaagtattctgtttgatactgtaatggtggacacatgacatgtcaaaacccatagaactttacagcacgaagagtaaagtttgtttattttttgagacatagtattgctctgttgccaaggctggagtgcagtggtgtgatctcggcccaccacaacctctgcctcccgagttcaagcgattctcctgcctcagtctccctagtagctgggattacaggcatgcaccaccatgcccggctaatttttgtatttttagtagagatggggtttcactgtgttggtcaggctggtctcaaacttctgacctcgtgatccaccctccttggcctcccaaagtgctggcattacaggcgtgagccaccatgcccggcctatttatttatttatttattgagacatagtctcgctctgttgcccaggctgaagtgcagtggcatggtctcagctcactgccacctctgtttcccaggctcaagcaattctcctgtcttagcctcctgagtagctgggattacaggtgcccaccaggacacccagctaatttttatatttttagtagagacagggtttcaccatgttggccaggctggcctcgaactcctgacctcaaatgatccaccctccttggcctcccaaagtgctgggattataggcatgagccatcacacctggcctagttagttattttttaatgacagagtcttgttctgtcacctgggctggagtgcagtggcaccatcatggctcactgcaaccttcatctcctgggttcaagcaattctcctgcctcagcctccgaagtagccgggattgcaggtgtgtgccacaatgcctggctaatttttgtatttttagtagagatggggtttcaccttgttgaccaggctggtctcgaactcctggtcttgaactcctggcctcaaatgatcgcctgccttggcctcctgaagttctgggtgtgatctgctgttctgggcctaagagtaaactttaatgtatgcaaattaaaaaaaatttttttagaggtcaaggcctttcaggcatgcaaatcttgacaggagaaactaactgtatcacaaatgtgtgaaacaaccttgctaaacgggaggaaggtgctgatttaagtaactttggaaatgagtggaatctgtaagacaaaagggactgtacataagcgttatactttaattgataaagttacattccgaaggggcagaggttaacaattctgatactggtttaaaggaatcagtactgattacataggtaactacaattgaacagttaagtaaatggatggcaggaggcaggcttttcactgttggagtggaatttacagataagcgaggcaggaggctagaataatctttgtggtaatggattcaggttggagataccagtacaaaatagttccatgtttatatgtagaaatatttatagatatatgtacatacttgagttaatatacacaaatatatttccattcattgtcagctgagagttgaaagaaacaacacctaggagtgcacctagtgcccagatcttggtttctttttttttgttgagacaggggtcttgccctgtcacccaggctggagtgcaatggcatgctcactgcagccatgaccttccagactcaagctatcctcccacctcagcctcccaaatagctggggctgggactacaggtatgccactatatgagtttactgtatgctcactgtatgagtttacagagtttaactgtgtgccactatgcacagctaatctaatttttttctttctttctcttttttttttttttttttgagacagggtctggccctgtcacccaggctggagtgtggtggcatgatctcagcccgcagcaacctctgtctcttgggcttaagccatcctcacaccccagcctcccaggtagctgggactataggtgctcgccaccacgtgtggctaatttttgtatttttcatgcagacaggatttcgctatgttgcccaggctggtctcaaactccagagctcaagtgattagcttcccaaagtgctggcattacaggcatgagtcactgcgrttggccaaagttttctatttttatagagaggtgggtctccctatgttacccaggctggtgttgaactcctgggctcaagcagtcctcctgcctcagcctcccaaagtgttgggattacaggtgtgagccaacacacctggccccggatcttagtttctaatattattctccaataaaagaaactagtgctccttggagaaatggttgattctgtgattggggcaggaaatatacataagatgaaccttgagtatcttgttgtgccaaaaaataaggaagtgctctaaaaacaacaacatttcacgttaatgggttatgtcgaaggagcaaaggaaccaactgaaagtttccagtggccaaagctggaacaatttgagtagcaaaattaaagcagaattggattatgacccatagtataaaataaagttttatattgatataaacaaatgattgaataaattaaaattctccttgaagtactccagtggcatagttttatgtcgtaggagcctctaatttgctggaagtacttcatgcttggagtacttaatcttgtggggctttgaagtcacacttcttggattccaatcttggcgcacttctgtttgtatgatcttgggcgagttagttaagctcagtttctttgtatgtaaaatggtggttgtaatagtatctgcatcatataaggtttaaatgaaaatgcaaacacatatgaaacatttggcatataaatctcagtagaatgggtgagcatgtagcctccttactaagtatttgagaaaatagggacatttggatccccacttggaattctttataatggaggtgcccccccaacccccamgctttttgcataaaggataatgtttaacatttaaagaagtgtttatcaaccacctggtttgatgtaaacatatctccttgttgattgttagaccacatagttaatagagtgaaagtagttacatttgctctttatrtaattatcacagatatgactgacttaaatatctacagtttgaaaagcaggatccagttagtgtacagttcaactcatgcttatttgcagatggtttgtctttgggatgaattacctgaactttgattttcagacttctttgaggagcacagttctacataacttgtctgttactacccacactggttaagtgtatccactcccataatgaaaactgacttttagtatagtaaaattaaatataaaagtgaattttgtacagaatacataattctgtacaatataaatactgataagttggccgggtgtggtggctcacacctgtaattccagcactttgggaggccaaggcagacaaatcatttgaggtcaggagtttgagaccagcctggccaacatggtgaaacctcgtctctactaaaatacaaaaaaaattagccaggtgtggtggctcatgcttgtaatcccagctactcggaagactgaggcaggagaatcccttgaatctgggaggcggaggttgcagtgagccaagattggaccactgcactccagcctgggagaaagagcaagactcccctttaaaaaaaagaaaagaaaagaaataagggcctggcagtaactagagagtacaaagcaatcagcccaggattactcatgaacacagctcaggaagtctgatatatgtgggtatgattctgaagcatacatttaccattaacatgaagctgttggcagggcagctgaaatatgatcagagttcggattcaggataatgagccagagttcagggtgtggaacaggctattcaatgaagaattgttccaaaaacatattgaatagttctttcatccttagcaatacagtatgagcctctggtcagatgaattttattttattttattactttttttttttttttttttttttttgagatggagttttgctctcattgcccaggctggagtgcagtgaccgcaacctctgcctcctgggttcaagtgatgctgctgcctcagcctcccaagtagctgggattacaggcatgcaccaccacacctgactaactttgttgtatttttagtagagacgaggtttctccatgttggtcagatggctggtctcgaactcctgacctcaggtgatcagccttccttggcctcccaaggtgctgggattacaggcgtgagccactgcgcctggcagtcagatgaattttaaagagcctctttgcgcgaagtgagacaggtctgataggaagttaagagacattttaaaggaactcttaatttgcctggaatgtggggaagtagtaaaagattaaattgtaaaaagtaactcaaaaccagatgataaaggtctttaaatttcaggctgaagaatttagattttattgagttttggaaaactattgaggaactaatggcataatcagaatgatgaatttgggctgggcacagtggctcacacctgtaatcccagcgctttgggaggccgaggcaggtggatcacttgagttcaggagtttgagactagcctggccaacatgataaaatcccgtctctactgaaaataggaaaaattagccgggcgtggtggcgggcgcctctaatcccagctacctgggaggctgaggcaggaaaattgcttgagccagggaggcggaggttgcagtgagctgagatcgcgccactggactccaccctgggtgacaaagcgagactctgtctcaaaaaaatataaaacaagaacgatgatttgggaatactgatctggaagtatctgcatagatgaattagagtgagaagaacctggaggtgggaaagtcaattaggaagcagtagtctaggtgtgaggctaagaagctaaatgaaaacactgataataggaagaaactgacatattccagacattattcccaaagaagaattaactacacattgggactcactgcatgccaggagagaagtagaagggggtgtaaaaaatgattcatagattttgagtctgaataattgttatataaataggaaagacagatgaactagctgctgtggaggcatatgagaagtttgggtttgtaggggctagaaaacatctagaaagcctttctagaagcatctagaaatgtggattgtatgctgtgcaagttgagagccagagggtcagtcatacagcagtgttaattgaattcctggtagaagatgagattttctaaggcgtaggaatagatgacagaactttggtgtactccgcatttagaataaagtttcagtcaaggagttaaggaatagtccaagttttcaaagattattaaatagagtatccaaaagcaagagtcactcaacaatatcaacttcattcattctgataaacagtggttatcagagagcatggttctcaactgtatcagacccaactctccttttttattacaaatattttataatacaccctttttttttcctttgagacagtcttgctctgttgcccagggtgtagtgcagtgtgcacgatactggctcactgtaacctccgcctcccaggttcaagcgattctcctgcctcaggctcccaagttgctgggactacaggcaaacccgccaccacacctggctaatttttgtattttttagtagagatggggtttcaccatattggtcaggctggtctcgaactcctgatctcaggtgattgcccgcctcggcctcccaaagtgctaggattacaggcatgagccactgcgcctggcctaatatgccctttttaaaatcctgaaatgaaatctataggtaatatataattttaaaaagcagtatgatgccctaattgtaatatattggggaaacataaataaagtaacttacacagtatgtactttaaaatgcaaatgcatgggcatgaacccataataagtgacataagacatagtcrtatcttctttttttgagatggagtcttgctttgttgcccaggctggagttcagtggcacagtcttggctcactgcaacctccacctcccaggttcaagcgattctcctgcctcagcctcctgagtagctgggactacaggtgcgtgccaccaagcccagctacttttttgtatttttagtaaaggcgggatttcactgtgttagccaggttggtctcgaattcctgaccttgtaatctgctcgtctcagcctcccaaagtgctgggattacaggcatgagccaccatgcccgccaagaaatagtcatatcttttgtactagtatggagaatcaccttgactaagagttacaaataggccgggtgcggtggctcacgcctgtaatcccagcactttgggaggccgaggtgggtggatcacgaggtcaggagatcgagatcatcctggctaacacagtgaaaccccgtctctactaaaatacaaaaaaacttagccaggcgttgtggcgggcgcctgcagtcccagctactcgggaggctgaggcaggagaatggcttgaacctgggaggcggagcttgcagtgagcagagatctcgccactgcactccagcctgggtgacagagcaagactctgtctcaaaaaaaaaaaaaaaagttacaaataaagtctgtttgtgttggtgactcaaatatcacagcaagtaagaggaaactattgagctaaggtgaaataaaagaggatggaatgatttgctcttcaggctcttccaagatgagcggggaatgacttcagcattttgaggaagagggaaaaaagatttgaagtaatcttggtagagaatgagaaacaattggtagaaggtgggtaaaagggttattgagaattatcaagtgttttgctgaagttggacgataacagatgggtcaggttgatggccatgcagtttccttgtagggaataagagacaaatgaggagatgaaagtggttattgcagcagcagcttttaacatgctaatcaagactaggctgaattgagaggccagcaatcttaaaaggtgattaagaaatgattgtcagccgggtgggtggctcatgcctataatcccactactttgggaggctgaggtgggtggatcacttgatgccaggcgtttgagaccagcctggccaacatggtaaaactccatctctactaaaaatacaaaaattagctgtgtgtggtggggtgcgcctgtagtcccagctacttgggaggctggaggtgagagaatcacttgaacccaggaggcggagattgtagtgagcggagatcaccccattgtgctccagcctgggcgacagagggagcctctgtctcaaaaaaaaaaaaaaaagaaaaaattgtgaatggtagtaatggttgcacaacaatgtgaatgtatataatgccactgaagtgtacacttaaaaatggttaaaatggtaagttttatgtcttttgccaccataaagaaaaaaattgaacacttaaaaaatataacttggttctccagatgtcatcataggacttcttgtggagaattttgtgcttacagcacctttttttggtggtattgtggacataagggaattcattgcagctgtcatttcagccatcagtggtgatatgctgcaaagatgatttctgggatgaatcagttgacaggactgatgtatactgggtgtcaaaagggagcatatattgaggattgtaagactagaagttaactgtgatctttcttcaacaaattgtttttgatttcatactcacataggtactgaggaataagttttgaaaatattccattcattggccgggcacagtggctcacacctgtaatcccagcactttgggaggccgaggcgggcgaatcacgaggtcaggagatcgagaccatcctggctaacacagtgaaaccccgtctgtactaaaaatacaaaaagttagcctggcgtggtggcaggcgcctgtagtcccagctactcgggaggctgaggcaggagaatggcgtgaacctgggaggcagagcttgcagtgagccgagattgggccacagcattccagcctcggctacaagactttgtctcaaaaaaaaaagaaaagaaaatattccattcatttcgaatcactccgtattacttggtagtcatacctccttaattagtgtcattttccttatcaggtaaaataactagagcatggattaattgttctgtaataaaagcttgggatggagccaagcagagtasttttacatttatacatgtatcaagatgaattatttgctgttctcttaagggagttttgttgtattttaaaaaccaatttctttgaaatcttctggagtgggtgggtacacgttaggtctcattttgaaaaggtgaaatttaaagtttttttttttttggatagtctcactctgttatgcaggctggagtacagtggtgcgttcatgacttactgaggtctcaacctcctgggctcaaaccatcctccctcctcagcctcccaagtggctgggtttacaggtgcatgccactacactcagctaatttttaaatttttttgtagagacaaggtctcgccatgttactcaggctggtcttgaactcttgggcwcaagctctcctcctgcctcacctcccaaagtgctgggattacaagcttcagccactgctcctggccaaaagtattttttagcattcttttttctttatattaccaagactgacaatttacaaactatgaaattcacataatttaaataaaatatacagttcagtatattttgaatatatttttggtagatttacagaattgtggaactatcgccacaatgggagtttggaacattttttttttccctttttctttccctctctctcactctcttgttgtgtgtgtgtgtgtgtgtttgttttttttttttttttttttttttttttttgagacagggtcttactccaggctggagcacagtggcacaatgatagctcactgcagccttgacttcctgggcttaagcaatcctctcacctcagcctcttgagtagctggcactacaggcacgcatcaccatacttggctaatttttaaattttttgtagggacacggtcctgctatgttgcccaggctggtctcaaactcctgggctcaagggatccacccacttcagcctcctaaatgttgagattataggtgagagccactgtgtctagcctgtcttttttattattctagtgggtatgaagtagtatggtgctttaattttaatttattaatatttagcattttttcatgtgtctattagctagtcatacatctttgttggtaaaatgttcaaaatcttttgctcatttttaaattgggttatttatcttatagagttgtaggttttatgtgtacacactgacaaacaactgtgtaaaaaaaaagttgtatatgtggatacaagacctttatcagatagatgatttgcaagtatcttctagtctgtggcttgtcttcattttctttttcttttttttgtcacccaggctggagtacagttgcaagatcatggctcactgtagcctcaacctcctgggctgtaagtgatcctcccacttcagcctcccgaatagtttgtccagaggcctgtgccaccatgcccagctaattttaaattcttttgaagagatgagatctcactgtgttgcccaggttgatcttgttttcctgggctgaagtgatcctcccacttcagtctcccagagtgctgggattacaggcatgagccactgtgcctagtttgtcttcattttcttaatgatatattttaaagtgtaaacatttttaattcgcatgggctaatttttgatcttttgtgcttttgattgcatatctagaattttttatggtcagtcatgaagattttctcctggtttttctagaagttacactgttttagataggaaagttatattagaaaattgtaaaaaaaagagaagacaactcaaagatgtatgattgcctttaaagcttatcacttagttggccgggcgtggtggctcacgcctgtaatccctgcactttgggaggctgagacaggcggatcacaaggtcaggagatcaagaccattctggccaacacggtgaaaccctgtctctactaaaaatacaaaaaaaccgccacaaataaacaaaaaaacttatcatttcatttagttgttgttgttgttgttgttttttgagatggggttttgctctcgttgcccagcctggagtgcagtggcacagtctcggctcactgcaacttctgcctcccaggttcaagtgattctcctgcctcagtctcctgagtaggtgggattacagacgcctgccaccatgcccagctaatttttgtatttttagtatttttgtattttaggctgggtacagtggctcatgcctgtaatcgtagcactttgggaggttgggactggtggatcacctgaggtcaggagttccagaccagcctgaccaacatggtgaaaccccatctctactaaaaatacaacaaattagctaggtgtggtggtggacgcctgtaatcccagctacttgggagcctgaggcaggagaatcacttgaacctgtgaggcagaggttgcagtgagctgagatcaccctactgcaagagcgaaactccgtctgaaaaaaatcataacaataatttatggtttattgagtatttatgtcatttggtgggcttattagtctaaattatgtcattatttagtcttcgtgtaaccctttaagtatttagagataaccaggtataaggcagatgctactgtttgaaagtggtgggagaaggctgggcgcggtggctcaagcctgtaatcccagcactttgggaggccaaggtgggtggattgcttgaggtcaggagttcaagaccagcctgaccaacatggtgaaaccccgtctccactaaaaatacaaaaatcagctgggcgtggtggtgggcgcctgtaatcccagctactcaggaggctgaggcaggagaattgcttgaactccagcctgggtgacagagcgagactccgtctcaaaaaacaaaaacaaacaagaaagtggtgggagaagcgttgttatactgattgtgtgattgtgtgattgtgtctctagtgaagatgttctgaccctaatgttgtctttaacaatgtaaggtagcaaagagaatgcttaggctatacctgtgtttctcaccctcacttttactcttttagctccaattttctaaatttaaattttactcattatggcatttttacaaaggatagtaaaatactctgccaatacatctattcccttgtaaataagataccttacatatatgtatgaatatgaattcaaaatgaagagggcagcacctattttgaagrtgatgctgagaacgagtgctcctctagtactttcctttctgaggtgcacaacagtgagcttggggtgtagatttggatagttgtttattcatagttttgggtaattttttattgaaagggataaaggaagtgggtatacattttaagatactgttttgaaaaagtatagtatgaattttcattgtgaaatgtaactgtgttgytgtatttttatattctttatatccttttaacttctgcctttgctttaggaggcagtgtctaacaagagctttatcatgatctttctgcagactcctgtcttttcagtgtcttgtgttctagaaggtctgatttctcttcacattgggaacaagcaggcaagagaaagggagaatggatagtaatttcatctttcacttcttatctctgttctgcagccgtgcagtcggaggtccttgtgcatgaagacagatttgttctatggcctcggagttgggtgccagggatgatggaggctgcactgagctggcaaagcccctctatcttcagtacttggagagggccctccggttggaccattttctgcgacaaacgtcagctatcttcaataggaatatttctaggtatgttattgtatctttgcaatatgttttaccaaattcctgatttccatcatccttacagattttacaggattaaagtatcttatgatttttatgtttgatattttcttttgcctctttcaaataaaaaagtcaatttatttcagaggaacagtttcttctgtaaagtgtccagttctaactttaaattatattttattgggtcagctgtaattgtggactcattcttcaatttatagtgatgacagtgaagatggactggatgacagtaatccattattgccccagtctggggatcccttaatacaagttaaggaagaacctccaaattcattgcttggtgaaacttctggagcaggcagttctggaatgttaaacacatattctctgaatggagttctacagtcaggtcagtgtggtgtgacatccccctttggactatcgttatcttggggcagtcatcctttaatttttttattctttgtgtttctttatacagaatcaaaatgtgataaggggaatttatataatttctctaagctgaagaaaagcagaaagtggctaaaggtaagagataaagcagggtgtttacagtgcagatagtctactaaagttactaatagatgggaaagttatcaactcattttggcagattgacagagtttttcaaatatgattctcttatactggatgtggtttttttgaagagattattgagaaaatctggaggattcaatgaagtcatttagcaaacatgaattgagtacaggttgagtattgctaatctgaaatgcttgagaccagacgtgtttcagattttgtttttgagacaacattttgctcttgttgcccaagctggagtgcaatggcatgatctcagctcactgcaacctccgcctcctaggttcaagcaattctcctgcctcagcctcctgagtagctgggattacaggcatgcgccaccacgcccagctaatttttttgtatttttagtagaaatggggtttcaccatgttagctaggttggtctcgaactcctgacctcaggtgatctgcctgcctcagcctcccaaagtgctgggattataggcgtgagccaccgcacccagcctcagatttttttttttttttgaatatttgcaatacaaaatgagatatcttggagatgggacccaagttaataaacaccaaattcatttatcttttatatacaccttatacacatagtctgaaggtaattatatttttcccttggggatgttgaataaactctgttttgtatacctgtgttttgactgtgacctgtcgcgtgaggtcaggtgtggaattttccacttgtggcatcttattggtgctcaaaacctttgagattttggagtattttgggtttttagaatagggatgctcaacctgttataacgtactgaggggaaacagsaagtacaaaaatttatcagatgaagtccttgcactcattgggtcacataatcaggaatattaattccataagttccataatttatattaattccataacttccataagttcctgagtagtttattcatttaacagatgttgatttagtgcatccatgtgcatgtgccaggtacgattatggttgggcaagtttcctgcccagtggtgcttacattctaaaggaggcaggcagttagtaagcctgtaaacaagtaaataaacatggcttctttaaagacgtaacatttcaactgattctgaatgatcacagagaaccatcttatatccagggtaacggcatttcggtcagaaggaacaactgcaaaagtcctgagaaaagaaacaacttagtatgtttggtggaaaaagaagtctaatatggctagagcacagtgaatgaggaggatggtggaagatgaagttacaagactgtgatcacacaggctttgtctatgttaaggagttcgtgttttactgtcgtaggcataagccgttggagtgtttacaagcagagaggttgttaatctcatttacactcttacaagattactgtcagtggccaaactgaattaaggatagtatttcttttattgaaactaattatttctcttttatacttttgctatgaagtactcaaaagcaattaaaacccttcattattatcactaggtccttcaaaaggctcatgtgtaaaaggtccgatttggttaatatcagttgcactttaggctgttggaaatgcagaaattgttatgcttagccgtcatattttgaaaaattgagttataattcattgtcataaaattcaccttttcattttattttatttttatttatttatttttgagacagggtctcactttttcaccctggctggagtgcggtggcacaatctcagcttagtgcagcttcgacctcctgggttctagtgatcctccagcctcacccctgtgaagtaggactacaggcccgcaccaccacgttcaactaatttttgggggtttcaccatgttgcccaggctggtgtcgaactcctgagctcaagcaatctgcctgcctcagcctctcaaagtgctgggattacaggtgtgagccaccgtgcctggccaaattcacccttttacaggttaaaatttagtagtttttcgtgtatttacaaagttgtatacccatgattacaatgtaatctcagaaaatttttaacattctgaaatgaaccccgtacccgttagcagtcactctccattttcttttttcttttttttgagacggagtcttgctctgtcgcccaggctgtagtgcagtggcgtgatctcagctcactgcaacctctccctcctgggttcaagcgattctcctgtctcagcctcctgagtagctgaaactacaggcgcttgccaccacgcctggctaatttttgtatttttagtagagacagggtttcaccatgttagccaggctgttctcaaactcctgaccttgtgatccccccgcctcagcctcccgaagtgctgggattacagacatgagccactgagcccggccggtagtcactctccattttctatttcctctgtcctttggcagcgactaatctgctttttgtctgtattgatgtgcctcttctggaatttttgtttttgttttctttttaggagacaggctcttgctctgtttcctaggttggagtgcagtggtgcagccwtagctcactgcacccttgaactcctggggtcaagcaatccttcctcctctgtctcccaagtagctgggactataggcacatgtctttttctgtagagaagagatcttattaggttgcccaagctagtctcgaactcccggcctcaagcaatcctcatgcctgggcctgccaaagtgttgggattacaggtgtgagccaccactcccagcctagacatttcgtataaattgaatcctatcataatgtgaccttttatgattgacttctttaattgagcataatattttcaagattcttcatattgtagcccctactcatgtgttattccttttcatggctgaattacatctcattatctggatattccacattttatttatccatttatcaataaatggatatttgggatatttctccttttgggccattacagcttgctttctatatttttttataccctataggtagttgttttttttgccttcctgtttggcatgtatgtatagtttgtatgtatatgatatttatgtattrtttatacttttgtaagtattcagaggaatttttagccttgttgctgataacatgtcccatgttttattgcattttagtttgtattccctaagtttaattagtattcttaatgtttttcagttgaatttataaagcatgtcataaggggaactggagtgactatctttctgctgtttttgtcattgttttggatctaggaaaaaatgcttggattataaatgggattgcttcacagcaaaagatacatttctattttcacccttttcagagcattctgctaagtgatgaatccagcgaggctgattctcagagtgaagacgatgatgaagaagaactcaatctcagcagagaagaacttcacaacatgcttcgactacacaaatataagaaacttcaccaaaataagtatagtaaagacaaggaggtaagagtttcaggagaaacacttcaaactgaatattcaccctctgctttatagtcattaaagatacatcattttggctgggcgtggtggctcacacctataatcccagcactttgggaggacgaggcgggcggatcatgaggtcaagaaattgaaaccatcccggccaacatggtgaaaccccctgtctactaaaaatacaaaatttagctgggtgtggtggcgtgcgcctgtagtcccagctactcaggaggctgaggcaggagaattgctcgaacccagaggcggaggttgcagtgagccgagatcacagcactgcactccagcctggcgacagagcragactctgtctcaaaaaaaaaaaaaaaaaaaaaaagagatacatcattttatggagctggaaatcattatcctcagtagtgagtgtaagtgggagctgaacaatgagaacacatggacacaggaaggggaacaagacacactgggcctgggcaggtgggtgcaggaggagggagagcatcaggaaaaacagctaatgcttgctgggcttaatacttaggtgatgggttgataggtgcagcaaaccacatggcacatgtttacccgtgtagcaaacctgcacatcttgcacatgtaccctggtacttaaaaaaaagagaaaattcctgactgggtgcggtggctcacgcctgtaatcccagcactttgggaggctgaagtgggcagatcagttgaggtcaggagttcgagcccagcccagccaacttggtgaaactccatctctactaaaaatacaaaaagttggctgggcgcagtgactcacgcctgtaatcccagcactttgggaggcccaggcgggtgaatcacctgaggtcaggagttcgagaccagcctgaccaacataaggaaactgtgtctctactaaaaatacaaaattagctgggcgtggtggtgcatgcctgtaatcccaggtactcaggaggctgaggcaggagaatcgcttgaacccgggaggtggaggttgcagtgagccgagattgagccactgcactcttgcctgggtgacagagcaagacttcatctcaaaaaaaaaaaaaaaaagaatttctaaaattctctggaatcaatgaaattaaactactaatacttcggatgtactagactaaaagatatgttcttaaaaaaaaaaagatacatcattttaactttaggtagcagtggagcagctttattgagatgtaattcacataacaaaacttcagccttatatagtgtgcaattcagtgtttttttaatatattcatagttgtgttactatcattactgcctaattccagaacatttgcatcacctcataaagaaaccgcatgcctcttagctgttgcccctcattctttctgtccctcagtccagacaaccaccaatccactctgttccttttttcttttttttggacagagtctcgctctgttgcccaggctggagtgcagtggcgcgatcttggctcactgcagcctctgcttcccagggtcaagcgattctcctgctcagcctgctgagtagctgagattacaggcgtgtgccaccacgcccggctttttttttgcgtttttagtaaagacgggttttcaccatgttggccaggttggtctcgaactcctgacctcaggtgatcctcccgccttagcctaccaaagtgctgggattacaggcgtgagccaccatccccagcccaatctgctctgtttctataaatgtgcccattctagacatttcatacaaatgcaatcatgcaacatgtgcctgtgtccagcttctctcacttaatgtcatattttcaagattgattaatgttgtagcatgtatcagcatttcatttcttcttattgcaaatattcgttgtatttataccttatcttatatatgcattgtccagttcatgaactatgattagcatatttctactttttggctattttgaataatgatggtatgaagatttgtgtacaggttttgtgttgatgtgttttcgtttctcttcattatatacttaacagtgaaattgctgggtcatatggaaacaccttgcttagccttttgaggaattgccagaatgcttacattctagtgttgcttattcatgcagttgctctttgggtgtagtgtttctctcttagaaagctcttcatacactaacattaaaatgatgatagttttgagtgacaactatttgaatgccgttaccaaagccttctgactctttctttctttttttttttttttgagattgagtttcacttttgttgcccaggctcgagtgcaatggcgtgatctcggctcactgccacctccgccttctgagttcaagcagtactcctgcctcagtctcccgagtagctgggattacaggcatgcgccactgcgcctggctatttttgtatttttagtagagatacggtttttcaatgttcgtcaggcttgtctcagactcaggtgatccacccgcctcggcctcccaaagtgctgggattacaggggtgagccaccccgcccagccgccttctgactatttctacaagtgtggaacgttgtacataatgagcaatagtatatttgaagacctaagaattttctagcaattagttaaggtccaaagttagttcagagagattggaataatattctgaaccttataaacctgtagaagtggtwaacagagtatctgacccttttgatgtaaaaagttccttccttcttaaactccagcagtaaggtacttggcgctccaagtatttgcttgttttttatgtttattttttatttatttttgttttattttttgagatggaggctctgttacccagactgaaatgcagtggcatgatcttggctcactgcaacctctgcctcctgggttcaggcagttctcctgtcttagtctcccaagtagctgggactacagaagccygccaccatgcctggctaattttttttatttttagtagagatgtggtttcatcatgttggccaggctggtctcgacttcctgacctcaaataatttgcccaccttggccttccaaagtgctggtattacaggcatgagccatggcgcccagctgagccaccatgcctggcctgcttgttttttaaattcagataaaacatacatataggaaagttatcagactttaagtgtacagctcagtgcatgctaatttaattttgatttttaacagaggacattgtaatagttccccatgttaatctttcagtcttatttcagtcctcagacaatttatttggctataatccaggaaagagatttaatagtgggctacctaattttaatttatatttatgcattagtaatatgtgaaacaaaattaatatgagatttggggagtaagtgaaatatttggaagcatttacttaccacttcctggatggaaagagttacgttattcatatgttagaattctggcaatgtaggcactatttataataatagcagactgtcttagtgggagatgaagagaggaaagacttgaaagattcaagaattgggatgactggtgactatttgaagcagacatatgactaatagaaaagcaagcatgaagggccagttgaagtggctcacacttgttaatcccagcactttgggaggctgaggtgggctgacactgagatgggctgaccacgaggtcaggagatcaagaccatcctggccaacgtggtgaaacctcgtgtctactaaaaatacaaaaatcagctgggtgtggtggcgtgtgcttgtaatcccagctacttgggaggctgagacacgagaatcgcttgaaccaaggggcggaggttgcagtgagcccagatcatgccgctgcactccagcctggcgacagagcaagactctgtctcaaaaaaaaaaaaaaaaaaaaaagaaaagcaagcatgaggaaccttagtaaatctgaggaactgttggtaatagaagtatggcttatttcttggtggtgaatttccaaggggagacatttctgcaaggaattaatttcatgtcttagtatatgtcaggtttaagtaagtatgtagaaattcagaagcatgaagagttttgctttcttaaattattttcagtgacttgttacgtgtataggagttgaactcattttgtttgaagttaagtaagtgattcccttagatatactagatgttactgatctctttgtgggaagaatactgtatttaggagctatgatttcctctggcttagttttctgtagtaaaggtaatttgaaagctgtactatagaaaacaggcccatcatggtctttgcctgcttcagttgcagcaatatcagtactacagtgcaggcctgctctccacatatgaccctttctatgagcaacaacggcacctacttggacccaagaaaaagaaatttaaggaggaaaagaaacttaaaggtgagcatgttgaactgccttccacgtatattcattcttagtttcagaattgcatgtggcctactggtgcatttggactttatatataagtccatatggtagaaatttgctttatctgaaaaactctcctttctaattagtagcaagtacagttttccctttggtatccatgggtgattggattctggacccctggcaggtaccaaaatccagagatgctcaaattcattatgtaaaatggtatagtatttgcatatgagctgtgcacatcctctcgtatactttaagtcatctctggattacttataatacctcatatgatgtaaatgctatgtaaatacttgttatcctatattgtttagagaataatgaccaaaaaaagtttgtacrtattcagtacagctgctgcaaccattcttttttttttttcctgaatatttttgatcctcggttgaatctatgatgtggaacccacagataggaagggtagactatattattaaccttaattcatatttggcttatagtctttagttctagaattggaaagacagattcctagctaaaggtttaggcaaaattagtttattccatttttcttatacacactctgcaaatattgcaaatgttctgggataggaagttggttatgcacagagaagtaagaaaagtaacctgaagtgtttggaataagttatcattgttgctgtccgaggtgatttaaaatagatcacctcctgatgatcttctgtagtgtttgtttgcatgtttgccaggaaatgtcctttcctctcttactgagctctcagcagctggatatcaggaaggaaactgaaagagaaagttttaaactatctttgtgaggcaaattttattcccctgaaagtattaatttctttttttttttttttgagatggagtctcgctctgtcacccaggctggagtgcagtggcgtgatctcagctcactgcaacctctacctcctgagttcacgcaattctcatgcctcagcctcccgagtagttgggattaaaggtgcacgccactatacctggctaatttttgtatttttagtagagatggggtttcaccatgttggccaggctggtcttgaactcctgacctcaggtgatccgcctgccttggcctctcaaagtgctgggattaccggcgtgagccatcgcacctggcttaaaggtatgaattgtactcaaaaaggctccttttagccttcccttctttctctattatctttattagtgttttctcaccctccacacactttctccaacctgaattaaggttttgtttcatgtatttttgtcttgcaagtcttagtgacatatcaatatgtctttttcttctcttttatttttctttatccaccttataggtatacttttttcttattttccccacactgcatagatgtatagccaccttatattgccaccaagtagaaataagtttccttcctttgactattacttgagtctgtgatacctcagacacatccttacctattaggttcaaaagaaatttggttcttgccacgcgcctgtagtcccagctactcgggaggctgaagcgggagaatcgcttgaacctgggaggtggaggttgcagtgagccgagattgcaccattgcactccaacctgggcgacagggcgaggctccgtctcggaaaaaaaataaaagaaatttggttctcgggttttattctgtatttcactttcatataaacagagtgagtatccagtgttcttttccaggttagtgaggtatcaatcagtatgtttcttcttctctgttacttttcttcctcaaggaatattcatgggtctgagtagataaagggatatgtgttgtcagtgtcaggtggaataaggaaagaaccttgcatgttttaagtcatgaggttgctttgtgactatctcctgtggaagtgcaacctgttgcatctgtttcttttgcagctaagttgaaaaaagtgaagaaaaaaagacgaagagatgaagaactttcctctgaagaatcccctcgtcgccatcaccaccagaccaaagtctttgccaagttttctcacgatgcacctccccctggcactaagaaaaagcacttatccattgagcagctgaatgctcgtcgcaggaaagtatggctcagcattgtgaaaaaggaactaccaaaggtaagtgaatgcctccaggagatggaaattaggagaatgttttctctccccacccactaaagaggaactctgagagctagatactttcacagataggaattctgcaaagaaactaatctgttggaatcaagaaaatgctgagtagtactctttcagttaacagtttcttctagaatgtggtcagaattcacaagacaattagttattgtgtgatgctccgtggtcaaaaaattggaggacaacttcttcaagaaaagaatgcagttttcctaaatatagcaatagatacttgacagccaatttataggtgatattagaaaaaattaaaaagaggccaggcatggcaggtcacacctgtaatcccagcactttgggaggctgaggtgggtagatcgcttgagcccaggagtttgagaccagtctggacagcatggtgaaaccccatctctccaaaaactacaaaaatgaactgggcgtagcggcacatgtttgtagccctccctatgcaagtggctgaggcaggatagatagagcccaggaggttgaggctgcagcgagctgagatcgcaccactgcactctagcttgtgtaacagaatgtgtaacataataaatatttatttattttatctcaaaaattaaataaaataaaaaggagttgatatgtttcttagagaatttacaaatgtttgaatgttgctggataatcacaggcactagaataaaatgtgaacgagttaaacatgtataagcatttttcctcttaattcatttggttttgataacattttattttattattattatttttgagatggagtcttgctctgtcgcctgggctggattgcagtgtcatcatctcggctcactgcaacctccgcttcccaggttcaaacaattctccttccttagccttccaagtacctggggctacaggcagatgccaccatgcccagctaatttttgtattttggtagagatggggtttcaccatgttggccaggctggtctcgaactcttgaccccaggtgatctgcctggctccgcctcataaagtgttgggattacaggtgtgcgccaccacgcccagccaataacatgttattttgatataatttcaaaattaatagttgcaaaccagatgccatatgtagcgttttttttttttttttaaagaagttgcaattatagtccaaggaatgtctgtttacccttaagtgagattcaccagttgtttacatattactcttaaggatgaattgagtgcaatcctgataggaacaggatatttcattataaattggattttttttagaaacgggatattttatgaattgagaaaagttgatactaaagtccatgtgatgaagtcagaatgtaggagtagctggggaagaattggaaaaatccccactaaacgttagaacacgctacaaaacctctacagttaaaaaagtatggtactggcacatgaataggcaaatagatgagtagaataagctggtggacttacaaattagtagtgccgagacaactgggtagcaatttagataaaactagatctgcatcttacacatatacttcatataggttagtatgacactttttaaactatggaggttatagtgtgttttaatttttttttttttttttttttgagacggagtctcgtctcttgccctggctggagtacaggtgtgtgatcttggctcactgcaacctctgcctcctgggtttcagcgattctcccacttctgcctcccaagtagctgagtagctgggactacaggtgcgcgccgtcacacccagctaatttttgtatttttrgaagagacgaggtttcgccatgttggtcaggctggtcttgaactccygacctcaagtgagctgctcacctcagctttccaaagtgctggaattataggtgtgagccaccatgcccaacctgttttaatgttttgaggatattacctttgatcccttggtatggtggtgttttgctactgtaaaattaaaattttttttccatagcagttaataagtatttctggagacatagttgatgcttgagcattctttttttttttttttttgagacggagtctggctttgtcgcccaggctggagtgcgatctcggctcactgcaagctccgcctcccgggttcacgccattctcctccttcagcctccggagtagctgggactacaggcacccgccacgacacctggctaatttttttttgtatttttagtagagacaaggtttcaccctattagccaggctggtctcgatcttctgacctcatgatctgtgcgcctcggcctcccatagtgccgggattgcagacgtgagccactgcacccggcctgtgcttgagcattcttgatgggaaagttatgggaaactttcccatgacttagtacctgatgaagaggcctcagatggtgtcctttcaatgaaagaaatgagttttcatttctttttgagatagggtcttgttctgttgcccaggctggagtgcagtggactcatcttggttcacttcagcgttgatctcccaggctcaagcagtcctcgcacctcagcctcctkagtacctggggctataagtgtgtgccaccacactgagctaattctgtttatttaatttttttttgttttttgagacggagtttcgctcttgtcacccaggttggagtacaatggcatgatctcgactcactgcaacctccacctcccgggttcaagcaattctcctgaggtagctccctcctgggtagctgggattacaggcgcctgccaccacactcagctaatttttgtatttttagtagagacggggattcaccatgttgaccaggctggtgttgaagtcctgacctcaggtgatccaaccacctcggcctcccaaagtgctgggattacaggcgtgagccaccacgcccggcccaattctgtttattttttatagagacgaggtctcactatcttgcccaggctagtctcgaactcctggactcaagtgatcctcctgcctcaacctcccaaagtgccggggttgcaggtgtaagccactgcgcctggccaagaaatgactttttttttttttttttttttgagacggagttttgctcttgtcacccaggctggagtgcagtggtacgatctcggctcactgcagcctccgcctcctgagttcaagtgattctcctgcttcagcctcccgagtagctaggattacaggcatgtgccaccatgcctggctaagttttctatttttagtagaaatggggcttcaccacattggccagtctggtctcaaactcattacctcaagtgatccacccgcctcggcctcccaaagtgctgggattacaggcgtgaaccaccattcctggccaggaaatgactttttagtgggaatatttgaggttcctggcttcagagtgacaatagctctttaattagtaagagttttttttttataaaaggctcatatattcccttaaatttgctgtcttacgtgcaaacattaaagaaatggctttcagaccttctttgtcactttgaacccattgtttctttaacatcaaggagagtactcttcagtactgaaagagccacccagctctgcctcttcagcatcttcttccatgtcaaatagacatcatggggagtcaggtttctgtactgacttttgtttttccccttagctagagtggaaaacacaaatagctgggttgtgggctgctgggtcattttgtgttaggtcttccttggagtttagttttagagaagattaggcttatgtggtggcagaaactgagtaatagtgacatcaggtttgcctaggctggaggtggggctagaatcacacttaggagactagtttatctttctcctaatgattcctgtatctggatgccctgctctctcagccttgcagattggccctggtaagcaacatgtttttaatcaggatagtgctaaggtttaggtattgtaacatttttctagtccacttcaagccttacatgtaacttaacatcttcccaaaagtatacagaagactatttaaggcatccacaatgctgacttattcttcttgaatgcttctttaatcgttttatgtatggcgttgagacaatacatctggatgacttatagaagtaatatatcttgcttggcttgacattttctaaccctctaggaattgagtaaaagactgttcattctacatagtcttagttcaaaaatgaatcctaaatgaaatattgttttttaaatattttaggcaaataagcagaaagcttcagctcgtaacctgtttctcaccaatagccgaaaggtaaaattgtagttttgtattttccatttcatgttttgctggaatatattcttcttctttggggtccatcttgctgctcttgtccgtcgtaacctgttgatcatgaatctaatagttcgtaagagagtttctgaatgttctcaagctgtttattttttatttttattttttgagacagagtctcagccrcccaggctggagtgcagtggcagtgatcttggctcactgcaaccaccgtctcccaggttcaagcgattctcccatctcagcctcccgagtagctgggattataggcacctgccatcatgccctataatttttgtattttagtagagacagtttcaccatgttggccaggctggtcttgaactcctgacctcaggtgatctgcctgcctcagcctcccaaagtgctaggattacaggcatgagccaccgcgcccggcctcaatctgtttattaaataaaattgttcttcctcacatttctggtatttgaacctttttggataagaccatagcccaccctgatttcttgagcagatcatggaatcttcctgtcttcagtctcgtctaagaaataatgatgtgaataccttcccttagaggagactaaaacaacttcctttaagaattgtgaggatcagattaggccatgttattagttgtgtttctctggggtagtcattcaactgtgtttcctcatttataaatgagggtgatggtaatgccaatttcatagggtttttgtgaagagtaaattggtttaatatatttttcagtggtgctaaagatgtaataagcagtgatagctgttattaatgtgtgcaataacattttgtaacttccaagcacatcccaggtccttcttcatcattataatttttcatcttctaaggtgatagaaattggatagatttcttatccctgataataccacagggtctgggcctatgtcacagtactgtacaaggacattartcaagttgcaggagaaagatgtggtcaaggatgacagtttggctgaacagattgaggaatgatgtggtttagagtccaggaagaaccagcttctggtatggggtcctttccgctgtaatgctgttgttgttttcagcttgctcaccagtgcatgaaggaggtgcgtcgagctgccttgcaggcmcagaagaactgtaaggaaaccttgcctcgtgcccgccgcctcaccaaggagatgcttctgtactggaagaaatatgagaaagtagagaaggagcaccgcaagagagcagagaaggaagctttggagcagcggaagttggatgaggaaatgcgggaggtagggcaaaagcataacattttgaaaaccctaattactacagccatttgaagagattcgtttgcattttgaaaattgtacatctaaccaatgacactgtcaattttttgttttttttttttttttggtagagatgcggtttctccacattgcccaggctggtctcaaactcctgagcttcgagtgatccgcctgccttgatctcctaccgtcagaaatttttttaaagacttaattttgaggatggtgattttagactagtaaaccaattctgcttttagtcttttggtaaggccctcctcaggcctttttctcttttcttctaagctgtcttcctctattctgggctcttattcctcaagaaaaaggaatgagcaaaagagaaagaaagtagcttttaattcatcttggtttgtttgtaggtgctgactgcagttttgctttttttggacagtaagaaatagatgccaaattcagggccagatagggacagtggacaatgagcccagttttctaagacttacccttcacctactgtactgttttatttatttttttgttttgagatgaagtttcactcttgtcgcccaggctggagtgcagtggcgtaatctcggctctgcaacctttgcctcccacattcaagcaattctgcctcagcttcctgagtagctgggactataggcacccaccaccatgcctggctaattttttgtatttttagtagagacagggtttcactatgttggccaggctggttttgaattcctgagctcagatgatacgcctgcctcggcctcccaaagtgctgagattacaggcgtgagccaccatgcccagcctactttactgttttaacttgcagccagtactgttggtaaacctgatgccagctgatgtaggctgtgtatattgctgagggaagcaagaggagagartaagaaggcaaatcattgtattgccattgataaaccagctgagatgaatggaaggagagttgagatttgaagaaagaagggaattagtggtttggatgatgttttctttcaggtatatgtagtaactcatgtcaaagtggagctttggagccttttctgagctcttgatcttcccttattttatcatgacttcgagaatgaagatggattttgctcagttctcttaagtctcctggttaattcgtatatttgcatgcaaggtaatcataattatcaagttagtaaacatttgatgcttttgggaattcttaactcagagaatttaaagtcatttcagagttagccacagatcttgaagttttgcaggcaacttggcctatattctagatttctgagacctagattcttagttatgttgatagctaactgatggttatgctgacttatgcatttttctttgaacttctgaaataaaattttgacatatcctttctgttttcttaatctacttcgttcatttaatcatatggtagttaacttctttagggttaaagatattattcttggccgggcgcggtggctcacgtctgtaatctcagcactttgggaggccgaggtgggtggatcacaaggtcaggagttcaagaccagcttggccaacatggtgaaaccctgtctctactaaaaatacaaaaattagccgggcatggtggcggccgcctgtaatctcagctgcttgggaggctgaggcagagaattgcttgaacccgggaggtggaggttgcagtgagctgagatcgtgccactacactccagcctgggtgacagaggaagaatccatctcaaaaaaaaaaaaaaagatgttattctttttcttaattgttttactttagaaagttttccttaggctgagtgtattggctcatgcccataatcctagcagaaaggcagagacgggaggatcgctggaatctaggagttcaagaccagtgtgggcaacatagtgatacttcatatctataaacagtagaaaaattagacaggtgtagtggcacatgcctatagtcccagttactttggaggctgaggtgggagtattgcttgagcctgggatgttgaggctgcagtgagctgtgttcttgttactgcctccagcctgggtgacagagtaagataccatctcttcagaaaaaaacaaagattttcttgatagcactttaggtttgaaacatgaacattcatgaagacaaaaacttaattttctctcactctctttctcaagttttcttctattttggatctggctcaagtgctataaagctttaaagagacaggatagttttacgtaggttactgctttataaaatatactttcagccttttgggtttttttttttttttttgctgtattccctattgtattgtttttcttttgggagagtggatcaaggataaatcaagtatattttatgaattttgttatgaaataattcaaaataatgactcttggaccaataatgctcttttttggaaaaaaaaaaaaataaagcaaacaaggctgggcgcggtggctcacgcttgtaatcccagcactttgggaggccgaggtgggcggatcaagagatcgggagatcgagaccatcctggctaacacggtgaaaccccgtctttactaaaaatacaaaaaattagctgggtgtggtggcatacacctgtagtcctagctactcgggaggctgagacagcagaatcgcttgaaccggggagatggaggttgcagtgagccgagattgcaccactgcactccagccagggtgagagagcgagactccatctcaaaaaaagaaaaagaaaacaaaataatgactctttaatatgctacttatactgtgttctgtgttccatataatttggtattttggattatgttttcattttattgtttatcttaggaatgattttatttatcgacacaatgattatttttcttaggttattttagagtagaggcacttagaaaaaaagtgatatcttactctgtcacccaggctggagtgcagtggcataatcttggctcagtgcagcatcaatctcttgggctcaagcagtcctcccgcctcagcctccagtgtagctgggactgcaggtacatgctaccatgcctggcaaatttttttattttttgtagaaacraggttttgccatgttgcccagtctggtctcaaactcctgagatcaagcagtccacctgaaaggcacttttaatttagccttctgacattaaaaaaaaaaaaaagaaagtttgcacatgtatgtgtattcagtctatattcgttttttgtagctattattatcacagatgaaatataggttgttgggttttgttttgttttgttttgttttgagacagagtcttgctctgttacccagtctgaagtgcagtggcgtgacctcggctcactgcaacctttcctcctgggttcaagcgattctcctgcttcagcctcctaagtagctgggattacaggcgcctgccaccatgcctggctaatttttgtatttttatcagagacgaggtttctccatgttgaccaggctgatctcgaactcctgacctcaggtgatctgccagccttggtctcccaaagtgccgggattataggcatgagctaccatgcctggccaaaaaatacagattgtgttggggagtattttgttccttcctgtagattgttttggggagtattttctttcttccattaacttgttaatttcatatacctattgtattggctttcagaataatttatagctctttgtcagctattttgacttttggtggtaagagttttagggccggtgtggtggctggccaggtgcagtggctcacacctataatcccagcactttgtgaggctgaatgtgggccgatcacatgaggtcaggagttcgagaccagcctggtcaatatggtgaaacccgtctctactaaaaaaatacaacaatacgggctgggcatggtggctcacacctttaatcccagcactttgggaggctgagacgggcagatcatgaggtcgggagattgagaccatcctggctaacgcagtgaaaccgcgtctctactaaaaatacaaaaaattagccgggcatgttggcaggcgcctgtagtcccagctactcaggaggctgagacaggagaatggcatgaacccaggaggcagtgcttgcagttagccaagatcacgccactgcactccagcctgggcgacagagggagactctgccccccgcctcccccgccgccaaaaaaaaatagaaaaattagccaggcattgtggtggacgcctatagtcccagctacttgggagagcaaggcaggagaatcacttgaacctgggaggcagaggttacggtgaggctcagattgtgccattgcactccagcctggcccacacagttagacttgtctcaaaaaaaaaaaaaagaaaagtttctgacatgtgtacattttcaaaaataataaagctacatagacatgtatccaccatccaggttataaaatggaatatactgtttgaatttagttgttgtctctgtgccaccatagaaaagtaatgtaagaaagaaacattttagtcagaagcctaatagagaaaagattcacagtataaaggagagcaaaacacttgttactagcagattatgaatgaaagttattcattgtgccaggtgtggtggctcatgcctgtaatcccagcactttgggatgctgaagccagtggatcacctcagttcgagaccagcctggccaacatggtgaaaccctgtctttactagtaatatacaaattagccgagtttagtggtgctcacttgtaatcccagctactctggaggctgaggtacgagactagcttgaacccgggaggcggaggtcgcagtgagccgagatcgtgccactatactccagcccatgcgaccagctgagactctgtctgaaaaaggaaaagaaatttattcattgcttttagtgccactgacttggctaaattaaaattgtttatcagtgatgtttacatttttaaaagtaaacagttggtaaaggaattgtatgcaaatataagtggtgaattctggactacttcttggatatcattgataatttggctctgttttcacttttttccctctttaggccaagaggcaacagcgaaaactcaacttcttaattacccagacagagttgtatgcccatttcatgagtcgcaaacgagatatgggtcatgatggtatccaggaagaaatcctaaggaaactggaagacagttctacccagagacaaatcgatataggtggaggagtggtagttaacatcacacaggaggattatggtgagtcctcagtcaggacttagaggaaggctacctcttattttttatatctaaaggttatatacattaatttttgcgaattttttattgattcataggtaatttaccagaaaagagagatttattgtactggagtagggaaagtgtgtttctataacagaagtataagaccatttattaaagaatttgaataggaagcgttgtggttatatgatcttgcaagtttgggaatatttttgttgtgatttgttagtagaaataacaggtattgtaatcasagttcagtagaactgaactgtgtttcagcagaggaaaacatctctcacataatacgattcttgtttatttaagcacaagaaagcagctgttcagttgtctttatgtgatcacaaggagagggaggaattgggatgaagtttgagaggaatttcatggagaatgctgattaagattgtgttgagctagaaatagtagagattgtaactgctttatagtatcttggggtttaaatatgtctgtatttctcctgttaaaatagtttcacctatcataaatatattaaaattttgaatcctgattgtcttgattgttgtagcttggtattatttggtagaagaaaccccagtactgagaggcagtgccgtgatgttttttgtgagcttgctttggctactggagaccatggcagtcctccacctccattgcatttccagcttcttacctctgagaatttagcctttctcttcccccaccctccgtgaacccagggataagtagaatgagggaatcagggatccacatacattggtgttaattgtatcttagaacaaaatcagttgataaagtgtgataatccataaattttgcttttcagatagtaaccattttaaagcccaggccctgaagaatgctgaaaatgcttaccatattcaccaagctcgggtgagtcttcagatagaaaggtttactgtaattggccctggaaataccccacaagcctttacttaggtggtcttcctttagtcttaatcacatttgcaattaaaagcatagactagcttgtgtatatgtgtgtgagtagctgtgtgtagggggtggagctgggtctctttcactttagattagtagggatactagaagaaaggcagaaaaacgaatattcagttttctagctttagcaatgtgttaatttcaagttagaacagtttgtatttttttttctttctcttgagtaatcatgggcaatacagtatgaaatgtatcatagatgtttaatgaaaaagaccatactcaccgggcgtggtggctcactcctgtaatcctagcactttgggaggctgaggtgggtggatcacgaggtcaggagatcgagaccatccaggctaacacggtgaaaccccatctctactaaaatacaaaaaattagccgggggtggcggagggcgcttgtagtcccagctactcgggaggctgaggcaggagaatgacgtgaacccggtaggcggagcttgctgtgagccgagattgtgccactgcactccagcctgggcgacagattgagactgcatctcaaaaaaaaaaagaaaaagaccacactcttggcttgttaagagagccatatcatggtttcaaaaaactgctacgttatttaatgccttctttcacttaagtaataacttgctctttgttatttatttatttatttattctttttttttttttttttttgaggcgggagtcttgctttgtcaccctcctgagtagctgggactacaggtgcgcaccaccacacccagctaattttttttattttagtagagacggggtttcaccatgttggccaggatggtctcgatctcctgacctcgtgatccgcccgccttggcctcccaaagtgctgggattacaggcgtgagccactgcgcctggcccaagctctttgttatgtatgatatagtgatgtttaacaaaatcagaaagaaactacaatcaggttgaattaagtaaaaaatttgctgtttttaatatactgcataggagcccctatttaacattgacagagtgtaagtcaaagatagacgaatgtgaccttccccaatttctaatataattgttacattaaataatattagtaatatgttttatagaaatgatgtcatatgatactacgttatattatcagattatgagaaattttgttccaattatttttcttagcacagggtagatatattgttatcttgagtcttattttcatgtaatatttttcctcttttttttttttctaattttttttttttttactttccagacaaggtcatttgatgaagatgcaaaagaaagtcgagcagctgccctacgggcagcaaacaagtctggcactgggtttggggagagttatagcctggctaacccatctatccgggctggtgaggatattccacagcccacaatttttaatggcaaattgaaaggttatcaactgaaaggcatgaattggttggccaatctatatgaacaggtgaattttagaaccgtgtcattctcttctattatctcttttcctaaagtcatttgttcaatgtgattgtgaaatgagtacaagatctggctgagcgcggtggctcatgcctgcaattccagcactttgggaggccaaggcaggcggatcacctgaggttgggagttcgagaccagcctgaccaacatggtgaaaccccatctctactaaaaaaaaaaaatacaaaattagcctggcatggtggtgcatgcctgtgatcccagctacttgggaggctgaggcaggagaatcatttgaatctgggaggcggagattgcggtgagctaagatggygccattgcactgtagcctgggcaacaagagcaaaactctatctcaaaaaaaaaaaaaaaaaaaaaaaggaaatgagtacaagatcatgttttagatttcacccttttaaaaagctgtatcctggggagggatagcagtaggagaaatacctaatgtaaatgacgagttaatgggtgcagcacaccaacatggcacatgtatacatatgtaacaaacctgcacgttgtgcacatgtaccctagaacttaaagtataattaaaaataaattaatgtagatttattaaaaaataaaaagctatatcctttgacaagaggcagaaggatgtctctgtttctctttctttttgagacaggatcttactctgtcacccaggctgaagtggagtggtgcgtttatggctcactgtagccttaaactcctgggctcaagtgaccctcctgcctcagcccccagaatagctgggactgcagacacatgccaccacgcctgactaatttttgtattttttgtagaaacgggctgtctccatgttgcccagactggtctcaaactcctgggctcatgcgatatgcctgcctcggcctcccaaagtgccgggacgggcatgagccactgcacccagctgatgtctttttgtttttttgtaacctggagatcctactggagaatatttgtgtatttcttatggtttgtcttatatggacttggtaaatctaattgcttttgtgtctgggttgtattagctaacagattggccttgccctgtctcatgtatcatggttcatagttgtagctgtagcattggcaaaagcaattactatagcagtgggtaaaagtgctgaggctgagtatctctggtcacttctctttaaacaagcctgttatcttggtcgttctttttggtaacaggttgaactttatttgatgaaatgcatgaggtgttgaccatgtattttttttccccagggtattaatggcattcttgctgatgaaatgggccttggtaaaacagtacagagcattgcccttctggcccatctggctgaggtgggtagatgcaatctttctatcttcatttctctagaatttagggtaatttctgttgaaaatcagccacttaaaagcactatgttaagctgtgtagcattccaagatagtgggactgggttcttgcctcagagctttataaggggacagtgttttataactttttggtttttaagagggctaggacaatttttgagcatgtgattttgagacactcctttccgctctgcattaattaccaccagtgtagtggcaagggccatatagttagatcagaacaccttgcctaacatttcagctctactcttattaccagtgtaaacttgggcaatttagcctctttttcaacttaactctctgaggcttagtttcctcttcctcttcctcttctatggagacgttatctactttataggaattttataagaattaaattttaaaaatgcgtaaaactgaaaaaaaagcaaaagctctatacctattaaataactacaagattgtcggataactagtatagtagaaaacaatacatacaagtcagtgtgtcatgaatgctttgtggataagacctataagaggtcagaagagggaatagttgcttgccatttttttctcaggtgtgtctttatgttcttattattaacataggatattactattgaatgtgcagatttgggatttactcactgtttctcttgttatttgtttcctattcttagattgttcttgtcattaattataattttgaattaaataccttcccttttcctgtagttggctgactgggtttttctgttgcagagagagaacatttggggacctttcttaataatttcacctgcgtctacacttaacaattggcaccaggagtttactagatttgttcctaaatttaaggtaaatatcagtccaaccaaaacatctattgctctttaaaataaactttttgactctccttttcttgccctactaattactcataacagttttaaattttggccggacttgggggctcacacttgtaatctcagcactttgggaggttgaggtgggtggatcacgaggtcaggaagtcgagatcatcctggctaacatggtgaaaccccgtctctactaaaaatacaaaaaaaaaattagccgggcatggtgccatgtgtctgtagtcccagctgctcaggaggctgaggcaggagaatcgcttgaacggggcagggccaggggggtgagggggcgaggggaggttgcagtgaagggaggttgtagcaagccgagaatgtgccgctgcactccatccagggcgacagagcaagactccttccgtcacaaaaacaaaaatatacattgttccaaaataacttgcatataatcactataaaacttactgctgggaacaatgagtgcatattgcatttagcctgataaatggatactcgtggtcaractgccacggtagaaaacatctaccttatttggtttaacatagatttttgacaaatcataccatcagtacacatcctatcatttacggcatttctcttttcatttaaatctattgtaaataattcatttcttttttttaatacatgtcttgtttttgtttttgttttgagatggagtctcactctgtcgccgaggctagagtgcagtggcacaatctcggctcactgcaacctccatctcccaggttcaagcaatcctcctgcctcagcctcctgagtaactgggattacaggtgtctgccaccatgcccagctaattgttttgtatttttaatagagagagggtttcaccatgttgtccaggctggtctcaaactcttgacctcaggtgatccacatgcctgggcctccgaaaacgcaaggattacaggcatgagccaccgcacacagctgttgtttttttttttaatcagagtttcactcttgttacccaggctagagtgtaatggtgcaaactctgctcaccgcaacctttgcctccagggttgaagtgattcttctgcctcagcctcccgagtagctgggattacaggcatgtgccaccatgcccggctaattttgtatttttagtagagacggggtttctctactgacgatgttggtcaggctggtctcgaactcccgacctcaggtgatccacccatgtcagcctcctgaagtgctgagattacaggtgtgagccactccatccagcccattttgcttttttagtagaggcaggtctcactatgttgcccaggctggtcttgaactcctggcctctagtcatccttctgcgtcagcctcccagagtcctgggattacaggcacgagccaccaaacccagccagttcattttcttaatactctaaagtctgatctctagtcttagtccagcttataatgtctaaggtagataatgtgaacatcgatttaattaattcagaggaaaagaattcaggttgaagtagggggtgatcagggaagtatttggcatccattgggcaagacattgattagatttaaacagctgcttagttatgaaaagttggaggaatttaagaaagaatgaataggatttattgtttgcaatttaaaagaattgaaaatgagttaaatatgtgttctgtccctaaaggaatakgataatgaagttgcacagttaagatagtattttggagattatatatcaaaatatgttgacatgatctctgtgattttgggtctctgtaatagtgatgggtttcctgtagttggagcttgggatagggtagaaatgtgaggcaggtatttttctggcttatgctttgtatggaataggaaattgtctgggatttcccactttgaggcagctttatggctgtggtcccattttgtggctaaattgtagatgtagaaactgtataaggagtgttaggatatatagcttttaatttgactgactcattttcatcttgctgagatgatgatgagatcattctaatgcagtttgttgactattttctcttaaattgtttgtcttgtggaatggtgatcaccatctttttctgctttttttttcatatgatgttcagtatatattgaacaatgcagatcttgaaaaataaaagatcttggccgggcatggtggctcatgcctgtaatctcagcactttaggaggtgaggcgggtggatcacaaggtcaggagtttaagaccagcctggccaagatggtgaaaccctgtctctactaaaaatacaaaaatcagccaggtgttatggcgggcgcctgtaatcccagctactcgggaggctgaggcaggaaaattgcttgaacccggggggcagagtttgcagtgagccgagatcatgccactgcactccagcctgggcgacagagtgagaatccgtctcaaaaagaaaaaagaaaaataaaaggtcttaaaattttttcaccaaaccacttaagttttcagtagctcttccactgctgatagatggcaatgtgatattactaatgtcattgatgcctttcctttgactttataagtatgcctgaaacagagctatcatttgcatgttgaactttctttcgatatcctaatttaggattatataccctgtgggtgttgccacctcttttgatttttttttttttttttgctttttttttttttcttagagacattttctccttctgtctcccaaggtggagtgctgagacgtgatcatagctcaccgcagccctgaactccacctcaagccattctcccacatcagcctcccaagtagctaggactaccggcatgcagcgccacaccctgctaattttttttttttaattttatggtgccgtcttgctatgttgccaaggctggtctctaactcctggcctcacacaatcatcccaccttggcctcttaaagtgctgggattataggcacgagccactgcagttggcttgattttttttttcctagtgccccaatatattttttattgtgacaaaatacatagaacatagtatttaccattttaactatttaaaaatgggctgggcctggtgggtcatgcctgtaatcccagtactttgggaggccaaggtgggaagatcacttgagtccagaagttcaagaacagccttgccaacgtagaccttgtctctacaaaaaatttaaaagttagttggayatggtagtgcatgcctgcagaccaagcttataaaaaaatgggccgggtgcggtggctcacgcctgtaatcccagcacttcggaaggctgaggcaggggggtcacctgaggtcgggagttctaaaccagcctaaccaatgtggagaaaccccatctctactaaaaatacaaaattagctgggcatggtggcacatgcctgtaatcccagctactcgggaggctgaggcaggagaatcgcttgaacccaggaggcagaggttgtggtgagccgagattgtgcctgggcaacaagagcacaactctgtctcaaaaaaaaaaaaaaaaaaaaagtacaatgtagtagcattaggtgcattcacaatcttgtgtaaccatcactgctgtctagtttcataactttttcatcagcccaaacagaaggcctttacccactaagcaatcacgttctattcaccttgtgctgtagcctctggcaaccacaaatttgactgctgtggctggatttgcttattctgaacactttgtgaatgctgtttctgtctggcttcttttactgagtataaagttttcaagcttcatccatattatagcatgtgtcagtgctttattcctttatatggctgagtaatattccattgtgtatatatatatcacattttgttcatccattcatctgttgatgaatatttgggttgtttccaccttttggctgttgtgagtagtactgctatgaacattcctgtgcaagtttttgtttgaacacttttactgttttcacttcttttgggtatgtacctatgagtagaattgctaggtcatatggtaattytacttattaaggaatcttccacctgttttttttgttttttgttttttgttttatgacacagagtcttgctctgtcgcccaggctggagtgcagtggcgtgatcttggctcgctgcaacctccgcctcccaggttcaagcaattttgcctcagcctcccgagtagctgggactacaggggtgtaccaccacacccagctaatttttgtatttttggtagagacggagtttcaccatgttagccaggctggtcttgaactcctgacctcaggtgatctgccctcctctgcctcccaaggtgctaggattacaggcgtgaatcaccgagcctggcctgctacctgtttttgaatggctgtaaactaagaatagtttttactttttaaaattattgataaaaaaayaaactttcatagaatgtgacatacaaagttgaaagtcatacgtattggaacacagccccacactgcactctttttctaccttttttttgagacagtgtctcgctctgtttcccaggctggagtgcagtgacatgatcttggctcactgcaacctctgcctcctccgggttcaagcagttcttctgcctcaagctcccgtgtaactgggactacaggagcctgccaccatgcccrgtgaatttctttattcttagtagaggctgagtttccccacgttggccaggctggtctcaaattcctgagctcaagcgatccttctaccttggcttctcaaactgcttggattacagacgttagccaccatgcccagccagcttttttctttatctgatgtcttgagatggagcttagagtattgattttcagcttctaatagatgtacatttaaggatactcattgctttctgagcatgactttagccatccaaaggtttgatgtgtcatatatacattgtctttcacttcatcataatctctaacttccattgcaagttcatttttgatctatggtttatttaaaagtgtatttctaggtgggatgatcacttgagccctggagttcaaggctacagtgagctatgatcacaccactgtactccagcctaggcaacagggcgagaccctatctcttttaaaaaataaaaagtgtaattcataattttcaaacagtggaggattgtctagatgtcttgtttgttattaattgataccttaaattcacattggtaaaagaaactttttatgactttaatactttgaaatttgttgaaccctcatttttatgtctcagcatattgtcagtgtttatatgtcctttgtgtattggaaaattataggtattctgcccttattcattgcagtgttgcatatatgttgatttaggtcaaagtttgttaagttgttcagctctttcatgtctttactgattcgtctgcctattctgtcactgactgagagtggtatattaaaacataccatgattatggatttgtccatttctcttctgtccatttttgctttatatattttgaggctgtaagatttatactcttcctggtgaactgaaccttttattattatgaaattttccttttaaagactttttgactaaaagtctgtattttctgatatatattgtttttctttaatttttttctgaatacagaatgtgagggcrtctttgcttaatttttacatggctttttttcttccttttatttgtaatcattttacatcatttatggtgcatttctctttttgagacggagtctatctgtcgccaggctggagtgcagtggcgcaatctcagctcactgcaacctccgtctccagggttcaagcaattctgtctcagccttcctagtagctgggattacaggcgcatgccaccacgcccggctaatttttgtatttttagtacagacggggtttcaccatgttagccaggctggtctctaactcctgacctcaagtgatccgcctgcctcagcttcccaaagtgctgggattataggtgtgagccaccgtgcccgaccttaaggtgtatttcttgcctcttgttgggaatatttgtgcttttaatgtaaatgctgatatattgagttttaagtcttccttcctaattgtttttctacttgtggcacctgtttaatttttctcttttccttatttttacattaaaawtttttttgagacggagtctggctctgtggcccaggctggagtgcagtgatgtgatctcagcttactgcaacctctgcctcccaggttcaagcaattctcctgcctcaacatcctgagtagctagaataacaggcacctaccaccacacccaactaattttggtatttttactagagatggggtttcaccatgttggccaggctggtcttggactcctgacctcaggtaatctgcccaccttagcttcccaaagtgctgggattacaggcatgagccactgcgcccaccctattttaaaaacattttttggcccatgacagcgctcaggagatcctgagaaatgtgtcccagtgttttggttctctcctttcttatgtccttttggactgattaaatgttactgctctccctccctctcttagcttattatttgtcttagtttgttttgtgctgctataacaaaacacagaaaactgagtaatttataaagaaaagagatttatttgttatagttccagagggcctgagaagtcaaaaagtgaggcgtcctcatctcacaagggccttcttgttgcatcactccagattggaaggcagaggagcagaagagcccagggtgagggggactcctgtgataatggcattaattcattcatgagggcaaagcccccatgaccttctcacccctgaaagctcccacctctcagtactgttgcattggagattaagtttccagcacataaacctcgagagagatgttcaaaccatagcactagtcatgtatttattttattctttttggttttttttggagacagagtctcactctgtcacccacgcttcagtgcagtggtgtgatctccactcactgcaacctctgcgcccagctaatttttgtatttttagtagagacagggttttgccatgttggccaggctggtcttgaactcctggcctcaggtgatccatccgcctcagcctcccagagtgctgagattacaggcatgagccaccatacttggcctattttattctctagtagataatctgggggaaaaacttgccttcttgacttaaaaaataataataatataaattaagagttactactttctggataatataaagacttcggtatacttggactacatcccttttgtctcgacttatatgctgtaggttttgtatactttttatattttaaaccccatgagacattttattattgcttatatattttatgtttagattttttcatattgtatattcaatttttattaatcttcatttcttcctgcatatttctgcttccatttggctgaaatttttcagaacaacaaaagatagcggtctgtagattcaagaagccctgtgaggtgcagggataaggagaaagaaaaccacatctagaaaacatcacagaaaaagtgctgaatcttgcattctgttgtttctttgtgctttaatctggatattttcttctgacttgtcatctagttcactaattttctctttagctgcatctaatctgtcattagatccattcattaatttcttgattttagttactatatttttcagttctaaaaattcgctttgattcttttataatttatagcataccattgaaattctctatcttgtttttcattaacaaattagcattttttaaagtatttttcatttttatttttaaatttttttattttatttatttttttgaaacacagtctcactctgtcgcccaggctggagtgcagtggcacgatctcggctcactgcaacttctgcttcctgggttcaagcgattttcctgcctcagcctcccgaatagttgcgactacaggtgtgtgccaccactcctggctaatttttttttttttttttttttttgkatttttggtagagacggtgtttcaccatgttggccagggtggtctctatctcctgagctcgtgatccacctgctttggccttgcaaagtgctaggattccaggtgtgagccactgtgcccggcctaaacttttatttatttatttttttgaaacaaagtcttgctctgttgcccaggctggagtgcagtggcacaatcttggctcactgcaacctctcccaggctcaagcaattctgccttagactcgtgagttcctgggactgcaggcgcgtgtcaccacacctagctaacttttgtattttttgtagagagagagtttcaccatgttgcccaggctggtctgaaactcccatgctcaggtgatctgccagcctcagtctcccaaaatgctgggattacaggcatgagccactactcctggccaaaagtctgtttttaatatttttattattttaatctcctctgtgtacgttatctttctttcatgtaggctttcattcatgtgatacggtctttctatatgtctggttattttttaatgctatgccagacattgtataggaaaagctatagagataagtgtgggctctcacaactgttttcttctagagaggatttatgtgtttttttgccactagtaattatttgggggttggtggggatgcaaattattcaaagcctttttaatctggaattcagatgtcttgaggcggggagtcggtacctattcagggaagtctaggcaagtctatgtatgatttactgttactactaccttgtagcctttgacttccaacttaaagccagggatgtggctggttacaagagtctttttccttgaactacaatttttgttctctatgtcttacatctttttgttttttttttttcctgagacaaagtcttgctcttgtcccccaggctggagtgcagtggcgccatctctgctcactgcaacctctgcctccctagtagctgggattacaggcgcgtgccaccacacccggctaatttttgtattttcagtagagacgtttcaccatgttggccaggctggtctccaactcctgacctcaggtgatccgcctgcctcgacctcccaaagtgctgggattacaggcgtgagctaccatgcccagcctatcttacatctcttaagaaaaagtgtcctcagtttcttaccctctcaactagaacttttgtaatgccatgataccatcagtgataaagtataccacatactaggcttacctctctgggcttccgttgttttctgatttgggcctctgtaattgcccactgtctcagtagctgttttatgccttcagacaaatgaattgtgtgtgtgtctttctatttggacaacagggttggttaaaccatttattccaccattggcaggagaggaattcctatgctcattttattagtttctttttaaattgttccgaattatatatttgttctaatacttttaagatcatctatagaaagtaatgtatatattggccctttttctaggtgctaccatattggggaaatcctcatgatagaaaagtcatcagaaggttctggagtcaggtaacattctacttaaactgcatacatacgtaccgtacatgcagtcattatttctctaattgatgtggataatttcttttagacaaaaatcttcttatctattatatatttctggacactgatcaagtttccatttttctgatacaatacttttcctgttgtaggcaatcagctggacttgatttccaggattaattaagaatctttttttttgagacaaggtcttgctctgttgcccaggctggagtgcagtggcatgatcacatttcactgtagccttgacctcctggctcaagcaatcctcccacctcagccacccaaactacaagcaggagacagcacacccagctaatttttgggactataggctcgctacaccatgcccggctaatttttgtattttttatagagatgtggtttcaacctgttgcccagggtggtctcaaactcctgggcttaagtgatcctcctgcctcggcctcccaaagtgctgggattacaggtgtgagccaccacacctggccagaacttttttctttaataagctgaagactagtttcagcctagtttgtggtaaatgtgactgctttaaaaacagttatagtggccgggcatggtggctcatgcctataatcccagcattttgggaggccgaggcaggaggatcacttgagtccaggagttcgagaccagcctgggtaacatagtgagaccccatctctacataaaataaaataaaataaaaaaattagccgggcatggtggtatatgcctgtagtcccagctgtttgggagactaaggcaggaggatcacgtgagcccaggaggttgtgtttgcagtgagccatgttcacgctgctggactctagtctgggtaacggagtgagaccctctcaacaacagcaaaacaacagacaaaaccccacagtatggttcacttcactgcacatctccctaccatatgggagaagcacatcttcagggctgtcttaaacattttggccctagaaaaacagtccatacatcagttccttattatgaattattaggtttctcttttcaccyttccccttttatatttacagaagaccctctacactcaggatgcccccttccatgtggttattaccagctatcagctggtggtgcaggatgtaaagtatttccagcgggtcaagtggcaatacatggtactggatgaggctcaggcgctcaagagtagttccaggtaacatgagtagtagaaaccaaactcaatgcattgggttaagtacacacacacacacacacacrcrcrcacacacacacacacacagacttgtatatatgaataaaatcaagatatragaagttttatttaatttttttaatagagacaaggtctcgctttgctgcccaggctagtcttgaactcctggcttcaagcgatcctctcgcatcggcctccccaggtgttgggattagagggatgagccacccgtccaatatatgagaggttttaaatatgacgtgacatgatctctgcatcagtcgtgtacctgatcagaaggcaaaaattccctttttttattttttcatggaacacaaatgttaatgccaagaataccaagacttttctcaacttttatctccctgttcaagaaggtgacatttttacaggtcatctcttcagggaaaatttctatagaggaaggagtctctgcccttgctttaaggtattattttagataggagttctaagtaggaggtagaatgttaggttatgtggattggatgctctgtttgttttatgttgattatctgagaccctggatggttttcagatctccaagaatccttttattctaagttatgtgtttaaaatattccaatacctttgaggtcccaaagtaaataaaaagtgttatttggtgatattaaacctcaggcttgatattttttttattaactcatggtgagtcgttagaaatttattagaggtccatgttaactggctagatgatattttctgtagaactttgttttttctattcttttctttctttctttttttttttttttttttttttgagatgtagtttcactcttgttgcccaggctggtgtgcagtggcgcagtctcggctcactgcaacctccacctcccagattcaagcaattctcctgcctcagcctcccgagtagctgggattacaagtgctcaccaccatgtccggctaatttttgtatttttagtagagatggggttttgccatggtggccaggcttgtctcgaactcctgacctcaggttatccacctgcctctgcctcccaaagtgctgggattacaggcgtgagcccttctgtggaactttctatcctcagaaaggtcttacttcctacagcaatcttttttttttttttttgagacaggggatagggtcttgctctgttgcccaggatggagtggtgcagtggcgcagttggggctcactgcagcctcgacctccctgtctcaaacgatcctcccatctcagtctcagagctgggactataggcgtgtgccaccatgctgggctaattttttgtatttatagtagacacggggtttctccatgctgcacaggttggtcttgaactcctgcactcaagcctcccaaagtgctgggagtacagacatgagccaccatgcttggcatactgcagttgttcgaaggagcatatgcctttggccaggagcaatgaagattcattttacattttcttctcaccaacactcctcataactgctctctccaaactcatactggaagtgcacagattaataattttgacactttataccacagatatgtactttctaattaaatgacttatgtcagcaaaaatgactaaagataatagaagagtttataaagccagaaatgatacaactctgcctatttgaggctatttttttctaaatccaaataccgtgttttcagtagagaggastcatttcccttggaagtgtcctgttttcagctttgttgaataatgtttttcagttgaatacatgatggagtacttgmttctgaatgttagttttttggaaggcatttttgtcaatatggggtctcagtaggataattaaagaacaatttattgctaacatgaatttgtaacttattttatcaaacagtgttcgttggaagatcctcttacagttccagtgtcggaatcggcttttgctaaccgggaccccaattcagaacaccatggcagaggtaggcactagwccaggtcacaggtttatatcttcataaaacagaaggattccagcagagcatagaattctttacccattcccttgcagtgctactgctttgtataaattatagtccccacataaaagacttgccccaagtcgtcttttaggcataggcatcattcctgttttcttattctctggcataaggccaatgaattactgtattcttttgtatttaaggaatactgaccacattagaaaatgtaaacatttaatgcagagacgtgtttttgctagagttgaaatgtaatatttgttaacacagaggggagctaaaatttttggggggagttaattgatcatctagaataagggtcagaaatccttatagaggctgcgtgcagctgctcatgcctgtaatcccaacaacttgggaggtcgaagtgggaggatgccttgaacccagcagttcaagaccagcctgggcaacgtggtgaaacccggacgctacaaaaaaaatcaaaaaattagccaggcatagtggtgcatgcctgtagtcttagctacttaggaggcagagttgggatgattgcttgaatcctgaggtcaaagttacaatgagccgagattgtgccaccgtatgccagcctgggcaacagagtgagactccatctcaaaaaaaaaaaaaaaaaaccaaaagaagaaaactttatagaaactgacagatagtatatattttatagagtttggaggccatgcaatcatggttrcagctactcaactttgcttgtgtaataaagtagccataggcaatacataagtgaatggccatggctatgtttcaataaaacttgatttaaaatagyggtagaccagacttggcccaacaggccatatttttctaacccctaatctaggattattagtagcaagttatcataccttaggttgtgttcaattatggaatagatttttataagaagatcgttaaaactatcccattgcaaaatctgagcatgacttgcgctttgaaacttttagtttgaaattagttgaaaaagaatcacattttgctacagcacctaataaaattagggttggttgatgaggcaagaatgtagttgaattcattcattttctgtctttcattcacacatacacatgcatctaggcacttayacactaatacacctgcaattttctctatctaatacatccttacacgctgtcattttattgctctatagctatttcatttttgtctttgtttacagctttgggctctgctgcatttcattatgccaacattatttgattcacatgaggaatttaatgaatggttttccaaggacattgagagccatgccgaaaacaaatctgctattgatgagagtgagtactgttatgagctggctttctatctacctatcagtgtaggcaaccacgtaattgcatattttcttttatttgaataatttttcttccagtatacatagacaaatcagcggggaagaaaaccacattttttgcttataaaataattttgttttttgtacatatttaacagtcaaaaaagaactaatttagatgattactactgtagtcttgtctaatcaaggcagatcaggcttgattcataaagtattatattttagcttgcagaattcacatttcccatttagatcttgaaaaattcatattggccaggcatggtggctcacatctgtaatcccagcactttgggaggctaaggtgggcggatcacgttaggtcaggagttcaagaccaacctggccaacatggtgaaaccctgtctctacaaaaacgcaaaaattagccgggcatgatggcgggtacctgtaatcccagctacacgggaggctgaggcgggtgaatcgcttgaacccaggagatggagtttgcggtgagccgagattgcatcattgcactccagcctgggtgatagagccagactccatctcaaaagaaaattcatatttaattctttgtgggtcaaatgggtcaaatgctatgggtctaatgggtcaaagcttttttcctgtgataaaaacagcaaatattagaaggaccatttttgttatttttctctatgtattagaatttgttttcattgtgagcatttttaaccttatcaatacttttgatattgttgaataatatctctctgattttaagagcattctgaagtgtttattacacagacatgagcttgctcactattagaaaaatccttatgtgattttacactatgagttgttaatttgctgacatcctttggaaggtaatttttggggaacactgagagtctcagataatttttcttatacttacaaccctattagtgataaaatgtccctaaaacctaaaaatgaattctaatgaaaatagagcctagtatatttatcctgttgactatagcaagatggtataaaaaattaaaattccttgctttcctacttgggaaaaagtttcagtctgcttttagagaatcattgagccaaaggagttttgaagagtttggtgagaggtgaatgtggtatttgtttctgttgtttttgtgaaatcactataatgtattatttgggggcctcccggcatttcagatcaactttctcgcttacacatgattttgaagccatttatgctgaggagaatcaagaaagatgtggaaaatgaattatctgacaaggtaagtaaagaagacctcatgtgtttaagcctcartaggcaccaacttaagattccagggggagaaatttattgatatatgtttagttgaagtttgcttgaaggaagacgtttaaacttgcatggatcaaagaggacttaaaatgaggcaaataattgaggaaaataacatctttttttctttttttgaaatgctttttactggagaatttgaaacattacaaaaatagaaagatagtataatgaatccccttgacccattgttccgtgacaataatcattaactctacctctctcttattcaaaagcaaatcccagatgttttataaatgaatatttgtttatgaagtattttcatgtatatttctaaaagatttggtttttttaaacactgcctaaccacatgccattatcacacctatttaaaaagaccagttccatgatagcatcacgtatctagtcagtgttcagatatctccagttgtctttgtgtgtctgtctctcttcttcaaagaattaatttgtagccgggcacggtggctcacgcctgtaatcccagcactttgggaggctgaggtgggcggatcatgaggtcaggaaatcgagaccatcctggctaacacagtgaaaccccgtctctactaaaaatacaaaaaattagccaggcatggcagcaggcgcctgtagtcccagttactcgggaggctgaggcaggagaatggcatgaatctgggaggcggagcttgcagtgagccaaaattgtgccactgcactccagcctgggcgacaaagcgaatgtctgtctcaaaaaaaaaatgtcagaataaggatacaagcaaggtccatacatagcatttggatggtctgtctctcagcatctggtttgttgtttcttttgaggcaggttcttactccttcacccacactggagtgcagtgacacaatcttggcttactgttgccttgaccacctgggctccagtgatcctcccctgtcagcctcccaagtagctgggactacaggtgtgtgccacaacacctggctaatttttgtattttttttttttttttttgtagcgaccagttttgccatgttccccatgctggtctcaaactgagttcaaaggattcacccgcctgggcctctgaaagtgctaggattacaggtgtgagccactgtgcccgacctcttagtatcttttaatctctccctccgttttttccccttgtatttttttttttttttttttttttttgtaagacaagggctcgctctgtcacccatggtggaatgcagtggtgcaatcacggctcacttcagctttgacctccttggctcaagcagtcctcccacctcagcttccctagtagctgggtctacaggtgtacaccaccacacctggctaatttttcatttttttctagagacaggatcttgctatgttgcccagactagtcttgaactcctggactccagcaatcctcccacctcaacctcccagagtgctaggactataagcatgagccaccgtgctggacttaaaaaatcagggattgtatatatatcctcttcaaagagaggagtagaactgtacctttatttagtctttttttctcaaaatcttgatgggtagttttttgaaattggctgattttagctaataaatagcaatgtcacatagatacaactgagagaaggaaaacattttatttaaaaaatgaatccctaatgcatttatatttaaagggtcatgtaaacaatagttcattgtttaaaattttttttttttgagactggattttttactctgtcacccaggctggaatgcagtagcatgatcatggctaactgcagcctcatactctagggttcatgggatccccccacctcagcctccctagtagatggtactataggtgcacaccaccatgcctggctaattttttattttttatttattttttatttttttgagactgagtcttgctctgtcgaccrggctggagtgcagtggcgcgatctcagctcactgcaacctccgcctgccggrttcaagcgactcgcctgcctcagcctccctagtagctgggactacaggtgtgtaccactaacgcccagctaatttttgtatttttagtagagatgaggtttcaccatgttggttggccaggatggtctcgatctcttgacttcgtgatccacccacctcggcctcccaaagtgctgggattataggcatgagccactatgcccagccctaattttttattttttaatttttatagagtcagggtctcactgtgttgcccaagctggtctcagaactcctgggctcaagcgattctcctgccttggcctcccaaagtgctgggattgcaggtgtgagtcagtgcacccagctagttcatgattgttgtttagtgctacatagagaggtgatctgaagatctagtatggttcctaaccactgtgtatagtatgtgtttcttaaacatcatttagcgtttcctatcttactatagttttgctagggaaagttagagaaggcattaaagcaaagatgacatgtgagctaggtttcaaatgatgagttggcatttactaggaaaatatggtgggaatggggggctaggcaacaagggcagtgtgagcaaagatagagtaacatcgaaatatgcagcctgttttggctaattttcagatcattgtggctaagtggtatgtgaggaggttatgatgatgagaaactcagacagtaaggtaggtttgattatgggagaactttctttttttttttttttgagatggagtctcattctgtcacccaggctggagtgcaatggtgcaatctcggctcactgcaacttctgcctcccgggttcaagtgattctcctgcctcagcctcctgagtagctgggattagaggcacgtggtaccacaccctgctaatttttgtatttagtagagatggggtttcactatgttggccaggctggtcttgaactcctgacctgtgatctgcctgcctcggcctcccaaagtcctgggattacaggcgtgagccactgcgtccggcctgattattggaggctttctttgctgagatgagaagtttcaacattttactttaggcaaaaatgcacattgaagatttttcagcagttgaattcctttataagctatatgtggaaagtatatcacaaccggaagaaactggaggcaggaagaccacaaaatattatcagtctatactatatcagatgagggccagcagtagggcaatgggtatggttagaaaaggtggtagatttccaagctgaattgaaggatttaggaaatactagaacatgaggtgtgagagagcattcagaggtgagttaagtttgtctttcccaactgaaggaatggtaatgctgttaaccaatttagtaaattgtggaaaagagaactgtttttctgacacatcacatatgccattgctgcagactgagtggtactcttagagttagtagttgcaggtactggcctgggttatgtttgggaatgtacttttgtatgttactgtgatgggtgttagttggcacagttagaaatggaagaaattgcccagggaaagcaaatggaatgagtgatgaagagaagagggccaaggaatatacatttttttctgaatgattgtccacattcacaggtttatagagatactgagttcacatatgtttattctcaatcataatatggtttgtgtgtgttttcaactttaagctgatgctgaattttcttaaaaactacttttccaaatataaatgttcttattgatttttagattgagattctaatgtattgccaactgaccagccgacagaagctgctatatcaggcactaaagaacaaaatttccattgaggatttattgcagtcttctatgggctctacccaacaagcacagaacaccaccagcagcctcatgaatctggtcatgcagtttaggaaggtaagagcttacgtcagttcccttgaagttttgttttttgttttttgagatagaattgtcttgctctgttgcccaggctggagtgcaatggcgtgatttcggctcactgcaacctctggctcccagkttcaggcaattctcctgcctcagcctcccaaggagctgagactacaggagcctgccaccacgcctggctaatttttgtatttttagtagagatgaggcttccccatgttggtcaggctgctctcaaactcttggcctcaagggatccacccgcctcggcctcccaaagtgctgggtgagccactgcgcctggccttgaagttgtctttattaacctttttcaagaaaaacagtctatccttgatgccagataagcaaaggctattaatgagatgaaaatgggaaagtatccattcccaaaggtaaacatttgggatttgggatcccctgtcattacgtatgatgtctgcatgtggtaatattgtcttaccatttcccttccttttaggtgtgtaatcacccggagttatttgaacggcaagaaacttggtctccatttcatatttccctaaagccataccacatttcaaagtttatctaccgtcatggacagatcagggtcttcaatcattcacgagacaggtagggaagtattactatctgttcactattagtgttttataatttacagttttatggcttagtagataaatttagtggagagaatatgagttcccagcaatgagacatttaagcaaagggtggacaactatttgttgagggatcttatggaaggaatttgagcactgttaaaacttcagctaggtggccttaaaggccctagtcacttctggttcttctttgaatcaggaatgtgcaccaatttgtaaatatgtacttgcagcaagtatgcatatctatgccccattgctgaaattggtttgtggtggcttactttacatttggaattgcacttgtgggtgaactgattgtattgtaagttaatcaaatttacctttttctcagagtcagcaacgataaatttagtaaagtttgaagtggttgttaaggtaatgcactagagacgacttccattcagaaaatagatgtgtggtccattccacacctgtgagttagtatggccctggcttctgaatttttaaacaagttcccagaggttttttctgcatatcaacatttgagaaccatggatttagaaagctgttttatagagaaactcatcaccaatatttagtttaatgaaactgaaattgaaacacatttcttggattttacttcatgagttatttgtagctccaggttaatatttaacttgagctgggaggaacaggccagagctgtattgccttttgtttagtatggtatatgataccttagggcactagaattgtgattctctgaaataaaatgagactacttttaatttgtattatcttcttacactttcactaaatattttgtatttttttaaatgtatgctatgatttttgcctggtaatatggcaagaaacttcttaaaagtgaaacagtttcaaaactaaaaggttttacttgctatggaacctctagtctagttaactttccattatttatgtttgggtttggctttattttwtttacttactttgcaggtggttaagggttctttctccatttgcaccagactatatccaacggtctctctttcacagaaaaggtaggtgttttgatctttgggaaagtaggtttgtcagggttttaccaggatgctctttgttttgctgagagactgatttagaacgagtattagttttgcctatatggtaggcccttatttataaaatcttgataagrtttaattaaggaaattagttatctttataggctctgtgatttgtagctatgagaggaaaaagtagaaaatagtattattgactttccatctttattttatacctgcctttcaagaatttcttgcccttgaaacttgacaaagtcggtgctggactgtctcattaatgagacttccttccgtcttagcctaaggaaaagaagctactcagctttgctcattgtccaaaatattaaggccaaggttcagaacctttcacctctgtcctgtccttttctttttcctagcattggacaaagagaaggcatttaggcaagcatccaaaaatcccaaaggtaatgtaggagccatctctagtctggtccatatatatatgccatatctcataggcctgcctctcttatctgttattgtagtataaaggtgtggcaccctaacttgcaccaaagtggctagatcagaacctttagaatagtgtttttgttcttaagtcaaaactcagcagttgagcaggctttaactgagcatcgtctcttggtttgctgttgggtttcaaattgtcttttatatttcaggtrttaatgaagaaagctgtttctctttccttcgctttattgatatatctccagcagaaatggcaaaccttatgcttcagggacttttggccaggtgagaggtttgcttattgcttgataagaggccagttaggaataaatgggatagatattgaatactgtggaattaaatatttaatatgatatcatcttagagaacttgtcattaattttcttttattaagaataaagtttgtaggctgggcacggtgactcatgcctgtaatcccaacactttgggaggccgaggcgggtggatcacctgaggtcggcagttcaagaccagcctgaccaacatggagaaaccccatctctaaaaaatacaaaagtagccggacatggtggtgcatgcctgtaattccagctacttgggaggctgaggcaggagaattgcttgaacctgggaagtggaggttgccgtgagctgagatcatgccattgcactccagcctggatcagttgaggccagcctggatcaattgaggcaacaagttcaaaactccgtctcaagaaaaaaaaaaaaaatagtacagtttgttgaccaggcccaggcgcagtggctcacacttgtaatcccagcactttgggaggccaaggtgggtggatcacttaaggtcaggagttcaagaccagcctggctaacatggtgaaaccccatttctaccaaaaatacaaaaattagctgggtgtggtggtacaccactgtagtcccagctactcgggaggccgaggcaggagaattgcttgaacccaggaggcggaggttgcagtgagtcaagatcgctccactgcgctcccacctggacaacagaacgagactcggtctcaaaacagaacaaaacaaacaaaaagactgtaatttgttattcataagtgaattgtacctttcttttgctcatttagtaattgtatgatgcttcataatatatcttaaataggccaggcgcagtggctcatgcctgtaatccagcactttgggaggccgaggcaggtgggtcacctgaggtcaggagtttgagagcagcctggccaacatgctgaaaccccgtctgtaataaaaacacaaaaattagccaggcatggtgccacgcgcctgtttcagctactcaggaggccgaggtgggagaatcactggaacccaggaggtggaggttgcagtgagcctagatcatgccattgtaccccagcccgggcaacagaacaagaatatatatatatatatatatatatatatatatatatatatatatatatatatatatgtatacgcacacagagacacacacagacacacacacacacagacacacacacaccccttaaatataaactgtttaggcttttctcccataatttctagtaagtcttgtttacttgtttctacagggcaaacggaggctggtgattcatttagttagtgattgcagcatagcctgcctcaagtgttctgggaagtttaattctctgttctctggtataatggttctcactgattttattacttttgatttatgtaatcagaaatggttatctccttaatatgaaggaatttttttttttcccgagatgaagtctcactcggtcgcctaggttggagtgcagtggctcgattttggctcactgcaacctccgcttcctgggttcaagttattctcctgcctcagcctcccaagtagctgggattacaggcgtgcacaaccacgcctggctaattttttgtattcttttttttttgtagaggtgaggtttcaccattttggccaggctgttcccgaactcctggcctcaattgatctgcctgtctcattctcccaaagtgctgggattaaaggtgtgagccactgtgcccggccaaggtgaatttttttttttttttttgagacagagtctcgctctgtcgcccaggctggagtacaatggggcaatctcggctaactgcaatctccatctcccaggttcaagcgattctcatgcatcagcctcccaagtagctggtattacaggtgcctgacaccacgcccttttgtagttttagtagagactgtattttgccatctaggtcagcctggtctcaaactcctgacctcagatgttccacctgcctcggcctcccaaagtgttgaaattacaggcgtgagccactgcgcctggcaaatttttttaaatactgataggagctttgcggaggattttagttttcatagtagcaaaccatgtaatgcgaaataatgtatctgaaagtaggaaagtaggaaagaactgtttctaaaatgataaagatttacaaaagagttatgttaatgagagacaatccttgctgctatgaacgaccctcaaacctccatggagcactgaataagcgtgtctgctgtggtttgtttcagatggttagctcttttcctgtctctgaaagcctcctacaggctccatcagctacgctcctggggagcgccagaaggggagagccaccagagatacctgaggaacaaggatttccttcttggggttaattttccactctcctttccaaacctttgcagctgccctttgttaaaggtaagcaattatttgagcataaattacctacttagtatcttctttccttttccttgaataagtaaaaataatagtaaagtaaatgaaggcctgagagaaccaaaaagttcccagaggagtgggcggtgcagcatattgagttctaacttaatttacactttgtatatatatttttgagtgtatttatattttcaaaatgtttttttttacaatactgtgaagtacacagatcttaagtgtacagctctgtgaatttatatatgtgtatacacttgtgtaacaaccacctagatcaatatatagaatacttccagctccctcatgctcctttccgtttagtagctctagtttagaaaaagacaaaccaacaattaaaggtaattgccatattctacttctgtcaccgtagattatttttgcctgtttgtgaactttatataaatggaattatcttgtatgtactcttttgtaactgggatttttcactcagtattgtttatgagatttgtccatgtcatatatagcattctttttttatggctatgaagtattacattgtctgaatggaccacaatttattaatctgttctactgtggtagatattttgtttgtttccagttctaggctattatgaataaaacccctatgcacatttgtctacatgttatttgatgaatgcaaacactcctttctttggtgtttatatccaggaatggaattgctacactgtcaagtataaccctgtttagagttagtagcttttgccaaacgtttttctaaaatagttttataaatttacatttgcacctacggtatgtgagatttgctattattcagcatcctccactacacctgggaatggcagtctgttttgttttgttttgttgtgtgactccttatgaataatcattccttacagttttaattatttttgtgaatgtgtagtggcatctcgtgatcttgaattatatttccatgaaaagtaatgatgttgtgtacagtttcatataattcttggcccttacagaatagtaggtgacaaagaaggtgaaagaaggtgacaggaactgaagttatagatgtaggtccaggtcatatggaacctcataagaattgctgagggtttggaatttattctgagtgaaatgagtaatgctagagagttttgagaagaggagtgacagttctttgttatagtccttcagctagattgaagtttagaaactaggtcattttccttgtatcctatagaaaatgttatggggtagttttacagttactgttgtagaatgaaggacattctttggctagctcattcagtatttgccccctgtacactgaaaagctcacatgatttccttctcttctgttttcccagttggtttcttaagcattgcttcatgtaatttttggactttggagagggaatcagtaatgcaaattaatgtaattggattccagcctgtttggagtaatgctgtcagtggtggcagggtgatttcctgctggtgaaatattcctagtatgtctactgggaacactggtatgtctgaagagttgcttaatcttctgtaaagattaattccttctctcaacccctaaatttggtaatatatgttactactgtaatacatttttatcagttctgctttttatacaaaaagcaccattcttccaagacattgttgttccctgttatatggacacctgcatttttcttaacgctagagatatgcatcactcatttgtattcttctctgttttctgaaaatattgtagtatgttccagagcgtctgcttagtgaggtccttatatcagttagaaccgtctgagaaatgcagatgtgggtagtatgctttatgggaaactggtcataaaatatgtttacgcagttgaaagattcacttatatttactcattttaatttgctcttgtagtggtttagagtatacactgaattaatgagctattgggccacggggagctgaaagcttatatatgtgtggagacactgttctgctttcaatctcatcatccttatctccaacatatgtatgtatattgaaataccaaccaagtagtgtattttgctagagcttatggttctcataattaatgataagactgtcagccgggcgtggtggctcacacctgtaatcccagcactttttgagtccgaggcaggcggatcccttgaggtcaggagttcaagaccagcctggccaacgtagtgaaaccccacatctactaaaaatacaaaaattagctgggtgtggtggcacacgcctgtaatcccagctactcgggaggctgaggcatgagaaactcttgaacacgggaggctgaggttacagtgagtggagatcacaccactgcactccagcctgggtgacagagcgagactccctctcagaaaaaagactgtcagttttaaaagatctctgctttcagggccaggagtgttggcttgggcctgtaatcctagcacttcggaaggccaaggtgagagtatcatttgagcccaggagttcaagaccagcctaggcaatatagtgagaccccatatctactaaaaaattttaaaaattaggtggggcgtggtggcttacccttgtaatcccagcacttggggaggatgaggtgggcggatcccttgaggttaggaattcaagactagcttggccaatggtgaaaccctgtctctattaaaaatacaaaaacaattagccgggtgtggtggcacatacctgtaatctcagctactcaggagcctgaggtaggagaatctcttgaacctggaggcagaagttgcagtgagctgagatcatgcacctgcactccagcctgggcaacagagcaagattctgtctcaaaaaaaaaaaaaaaattaaaaattaaaaattagccaagcatggtggtgggtgcctgtagtcccagctactcagtagtctgaggcaggagratcccttgaacccaggatgtcaaggctgcagtgaaccctgagtgcaccactgtactccagcctcagtgacagagcgagaccctgcctcaaaaaaaaaaaaaaaaaaaggaaatctttcctttcagccaagcaaaatgatcgttagatattatccactcttaaaggttagcctaggttctgaataaagaactagaagccggctgggtacagtggctcatgcctgttaatcccagtactttgggaggccaaggcgggcagagcacctgaggtcaggagttcaagaccagcctggccaatgtagtgaaaccccgtctctactaaaaaaatacaaaaattagctgggcgtggcggtgtgcgcctgtaatcccaactactagggaggctgaggcaggagaattgcttgaacccaggaggtggaggttgcaatgagccaagatcgcgccattacactccagcctggggaacaggagcaaaactccgtctcaaaaaaagaaagaaaaaaaaaaaaaagaactagaagctccaggtgtaacaattaacaacaatgtagaggctaggcatcgtggctcattcccgtaattccagcactttgggaggctgaggcgggatgatcgcttgagcccaggagttagagaccagcctggccaacatgacaaaaccccatctctaccaaaaaaatacaaaaattagccaagcatgatgccgtgtacctgtagttccagctacttgggaggctgaggtgggaggattggaaggctgaggtggaaggatcgcctgagcccaggaggttgaggctacaataaacggtgatcccaccactgcactctgagcctcggagagtgacagagtgagaccctctacgtctttgcaggaatgtggcattgtctgtctcttcatttaaactttgttgggtagtggtgtcttattatgtctttagttaaatttctcctgtgaaaatgatattgaataccttttctggtgtttattggccacttggataattgcctttatgaaatgtttgttcagaattcttgtttatttttctattgggctgactgtatttttcttatgatttgtagttctttgtatattacaaatatcttctactctgtaactttctcattttcagtggtaccttcccctgcccacccttttttttttgaaacaggatctgaattgttctgttgcccaggctggaatgcactgatgcagtcgtagctcaggattagggttaggttagggttaggtttgctgtgttgttcaggccggcctcgaactctggcctcaaacaatcctccggcctcagcctcccaaagtgctgggacttaggcatgacccactgcacccagcctcaatgttgtcttctgatgaatagtgaataatttttgtgtcctgttgaagaattctttgcctccaacaaattcgcgaagataattctatttctctccatatcccgtttattgaaaagaccattcttactggactgtagcatcacttgtcaagcaggtgtctatatatgtgttggtcagtttctgaactctgttctcttccatgaacccatttgactatccttgaaccagtgctactctatcttaataagtacagcttcacggtaagtcttgataactggtgcacagatcctctgactttgcatttcttctgtattgttttggctgttcttagcccttcgtgtattcatgtaaattttagaattggcatataaattttattttatcatattttctttcctttttttttggtagcagcagggtctcactatgttgtgtccaggctggtcttgaactcctaggcttaagcagttctcccaccttggtctcccaaagtgctgcgatcacagttgtgagcccgtgtactcggctaaatcttattttaatctcacctctttttagcagtctaggtagtataggtcagtagtccccaaatgttttgattatgttcctctgtaataacaacattcgtactctatttctccaatgtctgtatgctattttgttttaaattatatacatgtattcacatattaatatttacattgtgaagtttacgtgtgcctaccttggaaaccaccgatgtgagcagtttatttgagtagggaatggtggtagagtggagactcagtgtttactacagaagatattcctgtgttttacatgctgtacattgtttttcaaactattttaaattatttgacctcaaaggtccgtggagggcatggatttgtatatcgtaagtgcttatcgattgaatgaatctccagtgtagactgtgatctttgggaattgtctggtgcttcttttttcattgctctaggctaccttcagaacagccttttcccaatgttagtccagtccagcaaggagaaacatacgtaattaatgttgtttacaaacatattactgcataccacagtaggcaaagtgtgttaacaatcattatccctgtgctgtatttggaagagtcactcatgcacatattgaaaatatacactcatgcttaaaaacacacacacacactgaatgtggttcaagataagactttaaatactacacaattaactgcctgagtaatggtagataatgaatggtagagttcagatgggagaagatcactttatagaaatagtattgttaaattggatctaggccaggtgtggtgttggctcatgcctttaatctcagtactttaggaggctgaggtgggaggattgcttggagccaggaggcaagaccagcctgggcaacatagtgagactgtgtctctaattttgaaaaagttggattttgagtggtagagatttggataggaggaacataattccaagttaaggatttgagccaaaataaaggacagtaatgacagaaaagtctagaagggtaagtttggaaagtctttgaatgccaccctatgcgggtttagataataagcttgtcgtcccagccctatttgtcttactttcttcaacagatgcttaaagttgtattcctcggggtcaagtgttggtagccaatgtgaagccatgagaagtagtattctggtagcaggttcagtaaggctgctaaattaccagartcattatatcaaaccagttgggatctttgttatttgtattttatgaagattaacctcagagtgtgatatcaggaagaatggaggcagcaatccatgttaaggcagatgttaagcaaaagtttcaagtgtcaggtactaaagacccgatagcaatggttgtaacagaaagattatagaaaagggatcaagggactttgatcagtttggatatggatgggcactggagatggaaaaattacttcaaaaagccagagttcaagagaggatccagagggaatcttaagttccatatcaagtttaaagcaaaaactaaagagtgagattaagaactctttgattgtgagtacagattaaaaagagaaggcagaagcccagttgtaaggatttttagggagaaagatcctggttaggaggtgtagagaatgagtattgaagtgtgacagttaaaaagtaaggtatttcaggaggggagtttggtttaagtgaaagttgacttttttaagagaaaagagtcttgcagatttcacaacgaaaagggaagatgtcgggtgcagtagctcatgcctgtaatcccagcactttgggaggctgaggtgggcggatcacctgaggtcaggagaccagcctggcaaacatggcaaaaccctgtctctactaaaaataaaaaaaactagccaggcatggtggcctgtggctgtaatcccagctactacggaggctgaggcaggagaatcacttgaaaacgggagacgaaggttgcagtgagctgagatcatgccactgcactccagcctggacgacaaagcaagactccatctcaaaaaaaaaaaaaaaaaaaaagaaaagggaagaggggcaagagaggcatttggtgggggtgcgcaagttggttaactacactttttttttgagacagagtcttactctgtcgcccaggctaaagtgcagtggcacaatcttggctcactgcaacctctgcgtcccgggttcaagtgattctcctgcctcagcctcctgagtagctgggactacaggcgtgcaccaccactccaagctaatttttgtatttttagtagaggtggggtttcgccatgtgggccaggctggtctcgaactcctggtctcaagtgatcctctcgcctcggcctttcaaagtgctgggattacaggcgtgagccaccacacccagcccaactatactttttaataggatgaaaaactcttgtgaatactggcaggctgtataattaacagaaagmtatttctctgccacaaagaatgttttaaaatgtccagaacaactaacactaagcttaacattattttatttaattaattaatttttttggagatggagtcttgctctattgcccaggctcgagtgcagtggcacgatattggctcactgcaacctctgcctcctgggttcaaagtagtctcctgcctcagcctcccaagtaggactgcagacatgtgccaacacgcccggctaatttttgtgtttttagtagagatggggtttcaccatgttagccaggctgatctcgaactcctgacctcaggtagtttcccacctcagcttcccagagtgctggaattataggcttgagccatcgtgcccggccttaagcttaacattaaaaaaaaaaaaagtcctattaagtggttctctttctctctcttttttgttcttttttcttcaagtgagaaatcaatctatttttagtttttgttttgttttgttttgttttttgagatagagtcttgctctgtcacccaggctggagtgcagtggagtgaccttggctcactgtaacctccacctcccgggtttgagcgattctcttgcctcagcctcccaagtagctgggattacaggcatctgccaccacacctggctaattttcgtatttttagtagagagacggggttttgccatattggctagactgatctcaaactcctgatctcaagtaaccggcctgacctcaagtaacyggcctgcctcggcctcccaaagttctgggattacagtcgtgagccaccgtgcctggctaaaaccaatttaaatgtttggacattttatataattcatcttccctttgtggtctggttattttgggcacttttaaggttaaataagtgtttgctgaatgacctagtgaataatggcacattatattaatgcaccagtattaatattaataacaatattggtggattggtactaatctttggaacatggtatgtattaatctgagggaatgtcttctagcctaaaattaaaagtacagttttactcttaatattttaaatagaattttgtgaagagcactaacttctaggggtttagggaaagtgggcaggataggtaatctgtttgatcattcattgatcttaytgcacttagttatttttgccctgcatttgatctgagaactagaggtgacacgttccttgggtagtaaggaacaccagagagaagtgaatctatagaaacttgcaatagaggttgctaatgagctcaactatggattttagcccctgtagtagtagttatataacatgttatcttaaaacctagagactaaaacaataaacacttgatatctcacactgtttctgttggctgggaacttgggagcagcttagctatgtggtttttttgggtttttttttttttttttttttttttttttcgagagagagttgcactctgttgcccaggctggagtgcagtggtgcgatctcggctcactgcaacttccgcctcctgggttccagtgattctcctgcctcagcctccttgagtagctgggattacaggtgtgggccatcatgcccagctaattttatgggtttttttgttttgttttgttttgtttttaaagcagagatggggtttcaccatgttgaccagactggtctcaaactcctggcctcaagtgatctgcccaccttggcctccctgagtgctccgattacaggtgtaagctaaggcgccagactttttttttttttttttttttttttttgagacagagtctcactctgtcccccagattggagtgcagtggtgtgatctcggctcactgcaacctccgcctcccagtttcacgccattctcctgcgtcagcctcccgagtagctgggcctacaggtgcccgccaccacacccagctaattttttatattttttaatagaaacggggtttcaccatgttggccaggatggtcttgatctcccgacctcgtgatccatctgcctcggcctctcaaagtgctgggattacaggcgtgagccaccgcgcccggtctttttttttttttagagatgtagtcttgctttgtcacccaggcaagagcgtagtggtatagtcatggctcactacaacctccacctttggggctcaagcagtcctcccacctcagcctctcaagtagctgggattacaggcaggtgccactacacccagctaatttttggattttggcctcaagggattcccctgcctcagcctcccagagtgttaggatyaggtgtgagccatcacacctggccaaggaatttgtggccatataaaactaccacagccccttatttccatgctgatcccattatatcagatatttcattatgaaatttgttttggatttcctgttctgagattctggcttagactgtagatggttctgactgtagtactagttcttaactagtttttcaactagaaaggattttggactctatccttgtgctctgttacccgtgtttcttcacagcaaatgttagctgggaaagatagtaactatagtataataacgaggtttcattttcagcagggattctttactcataaactcttaactccttgtgagcattttttttcttttcattgcaagctctgtattttcatttaatttgccacattagttctgattatgtaactttaattatttggaaacataatgcagaagagaagcagttctccagtgaagacaaattatgtttcaaggttttaatggaagagtatgcaagttgaacccagattccatgttccagatcagtcttaaaaagtttggggttattcttcggccaacaaacctgagaagagacatggggaaatgtaaaagttggaaggggtctcatcattctttttcttacgaaattcaaataatattttagactaaagctcctttggagctaacaagttagttttgagttaatttccccatattcagctttgtcatcttaaggcagaaaatttttcattctgtttccttctacgccttcatttgttgtataaagagagttattgttcctgtagcctgtctcctaaatataacttcctatcatcagatcaaggtaaagactttgtttttcttcctctgtggagacagatcagtgttcacttagctacatgttgtcatattggtcttggtaagctgtgtgaggtcacatactacctgagccatattcagcagtctaacccagtcctccccttcttctcttactccccagggaaaggaatgaatccaaacagtgagaagctctcttctccttacctcccccaaccccataatgtgcctataaaacccttgcactcacccaccctatggtgaagataaaatatgaattttttgttacagaatccaaagaagtaccattcttgtattattagcttcaggatgatacacataaacatcaagaagctaagaactaggctaaggacacagatcggttgatacttagaggtgttttggataaagttttgggtttttttgtttgttttttgagacagagtctcgctctgtcaccaagactggagtgcagtggcaccatctcagctcactgcaagctctgcctcccaggttcacgccattctcctgcctcagcctcccgagaagctgggactacaggcgcctgccaccacgcccggmtaatttttttgtatttttttttttagtagagatagggtttctactctagcgttagccaggatggtcttgatctcctgacctcgtgatcctcccgccttggcctcccagagtactgggattacaggcgtgagccactgcgcctggcctaagtttggggtttttaaaaaatctcttaattgatgtgaatacttttcagagatttccttctcttatgtttgtagaacaaaaactagcatggctccctgtattctacttaattttcttgtgttctaccctgcattgctattaagaatttcaggaatgagtagatttgggtcagaactttcgcacaccttccctgcacactgtggtacctctggccagagttattttcttacactgttttgcagtggataaagagtgtgattttgtttgtttgtttgttttgagacagggtctcactctgtctctctactcaaggaggctgaggtgggaggatcccttgagtccaggaatttgagattacagtgagctatgatcacactactgcaccccagcctgggtaacgagattgtgtctccaaaaaaaaaaaaaaaaaattctgattcaggcagcagagatagaaaaataaaattttattttgcttagaagaataaagacaaaaaagagagcctgtcgtaaatatgccatttagttatctttcttggggcagaacagatttgagtctattccaattaaatgtcatgttaaaaattaaaaatgatggttggcagacacagagtacagtaccagtattgattctgtctcctgtctgtctcattgaaactgttgtcatggtaatggtctacttatgcatagtaygtgctgaaagttttttttgtttgtttttttgttgttgttgttgagacggagtctctgtcacccaggctggagtgcaatggtgtggtcttggctcactgcaacctccgcctcccgggttcaagtgattctcctgcctcagcctcctgagtagctgggactataggcgcatgccaccacccctggctaatttttgtgtttgtagtagagacggggtttcattatgttggccaggctggtttcgaactcctgacctcgtgatccgccctcctcagccgcccagagtgctgggattacaggcatgagctaccacgcctggcctgaacattttatatactctacagttctagtgagtcaagtgactcctaaaaatcgggggcatttcagattttgcaatttaaaatacacaaaggttctaaacatagagttgttttgaagagagtggcatatgttgaagttttaaacactattctgtattaaatccttagagttttttgacgggctattgattgaagatttcaccccccaaacaggaagttttcaaaaactcttccactaaatgttagttttcagctacagtacctgtatctatatcatcatttcctgagatcgtgagtgctgcaaatgccccttatggaaagctctgggaaactattgtgtttctctgcattaattttccctctttttgtttggatgcttaaaatatccatggaaatataatccgtataatctaagagctgatttatcaacactgtgctgtttcatttaaagtgaaactttttcctctgtatctaaatttgacatgctctttaagaaaagatgtagaaagctaattttgagtactggagacctaaatttttaacataagcatttttaattttaaataaaacatgtagtacaaagcatgacctcttattaaatgagtaagtctaggtctgagggaaaaacatcggtgtgttttctgtgctgtgctgtgctgtgctgtgctgtgctgtgctgtgctgtgctgtgctgtgctgtgctgtcctgtgctgtgctgtgctgtgctgtgctgtgctgtgctgtgctgtgctgtgctgtgctgtgctgtgctgtcgctgtgctgtgctgtgctgtgctgtgctgtgctgtgctgtgctgtgctgtgctgtgctgtgctgtgctgtggcaaggagtatgcagctatggagcctgtcatcctggcctatttattttcacttgagacttttgtatggtgcgaaaagagtctttagaaaaggctgacttcactactgtgtgcatattatagtcctggcggcaagacgcacacatctgccagtgcttccggggtaatgagacattcaagagcatgagaaagggacagaagaatagcaaaagctgtgaccacgtgaaaaccaggtcaaattccccatagtatggcattctccctcccttcctcccttcctcccttcctcccttcctccctcctcccttcctccctccctccctcccttcctcccttcctcccttcctcccttcctcccttcctccctcctcccttcctcccttctccttcctcccttccccttccttccttctccttcctcccctccctctctccttctctccctccttccctctcttttccttcccctcctttccttctttctttctccctcttcccttctctttcacttttcttctttctttctttcatgaccaagttagactaaagaagtaatgaacaaactttcttttctatctacaatattgcttaaggtattctttgtattcttccatgtcaggcatacatttttctatatctagcaatgtctagcagttcatgttgctacatgaagggaaattggatagtgtggtggtaccaaggttcacatatactaaaccagatttgatggaactaatgttaagagaaaagaatctagaaaagtatatattgggtaaaacattctaggggtagtcagggtttctctaaagttgaggctatatgttgagcattttgaacatagttattattttttaaaacctggaatcagaaagctatacatcaccttgacttagcaacttcaatgagaatactattttaacccagctcataaaaaataagtgaatgagccaggcacagtggctcacgcctgtaatcccagcactttgggaggccaaggtggacggatcatgaggtcaggagtttgagaccagccgggccaatatggtgaaaccccatctctactgaaaatacaaaaattagccaggtgtggcgcacacctgtaatcccagctactcgggaggctgaggcaggagaattgcttgaaccctggaggcagaggctgcagtgagataagatcacaccactgtactccagcctgggctacagagtgagactctgtctccaaaagaaataaaataaaataagtgaatgttggccaggtgtggtggctcatgcctataatcccagcactttgggaggctgaggagaggggatcacttgtggccaggagttcaagaccagcctggccaacatggtgaaaccccatcactactaaaaatacaaaaattaaaggcgtggtggtgcgcacctgtaggcccacctactcaggaggctgaggtgggagaatcgcttgaacctgggaagrcagaggttacagtgagccgagatcgcaccactgcactccagcctgggtgacagagaaagactctgtcccaaaaataaaaataaatgaatgtgttctaatttgggaatgaccacccctgggaatagaattattgctagtcagactttttccagaaaggtaataacaaataatgtgctttgttaaaagaactccctatggtgagttgtattcttttcttagtaataactacagtgctgaagagaagataattggaggaaatgttcattcttttattttctacctttatattattggaacaaagtaagaaacaggtttctgttgaattttgaattttagaatactcaaaatgaagatgaattaatgcgatacctgatagagacattatttagtgactggtctgtagaagttagtaagaattcagaagtcttcaggtcagctactgctgctgcctcagccatctgcccaggaatggtctgattgacagtggatgtcccagctggcagccctgaactactacttagctggcggtgatgagcagaagttgctagacttgtcatctctcctccccagtgagggagcaagatgggctactgctgatgtcagaaatgcactttcaggraacmaacmaaaaacgtggctacatctttttacctttttcctcctaattattcagtattggaagaacagtctgacacctagcctgctaatctttgtaacgatactcatgttagacattcaagtgataatgggcataaacatgtagagagataatgaacttcaacggagatgctacccaaaatcaagatgggaacacagatgttattgaaaagctgtcagaatgytaaaattcttctttgggtaatgacagggacctcaacatttagagaaaaggccaaacatatcatagctacatgggcctagcagtatatcaaatgttgtaaacacttctgtagtctgtagtcagaaaccacctaaagacagcccagctatcctggaaaatagctatagtcttcaaattgttgatgacagttatttagaagatgctgattggttcagggaaacagataacagtgcatatgtcgtactagacaacttgagatcactgctttcaaactatgagccttaagaacccatttccttacagagatgtaagccctgtggaaaataaagctgtataagtggaagagcaggatatgagctgaacaaattatcctcagagtgatttggtactggtattataactattattctcttacagaggatccaggttgctgttctgatcttgcagtttgtattcttgaccttacaacaatgtataaattagactgccttgtatgttatcttcatctacatggttattttggtcatcaacctgccttattgagatatcagtaaaacaaataagaatgcagatccaaagataaaacgaataacatactgaggaaggaacttctgcatttcttatatagaacaccatgtcccactgaggagtgatttgtatgtgaacatttcatacttaaaatctttcatatgactggctgtgacctgaagctgtaacatgagttatgaagtctgttaaaatactttttttttttgggacggaatttcactctttcacccagctggagtgcaatggtgcgatctcagctcactgcaacctccgcctcctgggttcaaacgattcccctgcctcagcctcctgagtagctgggattacaggcatccgccaccatgctggctaatttctgtatttttagtagagacagagtttcgccatgttggccaggctagtctcaaacccctgacctcaggtgatcacctaaaggtgatcccggcctaaaatacatttttgatacggcaacataagtgaacaataaatatattttaaatggttgtcagaggcactaaagagatagaatttcctgttactgaccccttgtattgattactctgaataaattaataagaaaacaaatggtgctaaactgccttaaagaaaaatttagaaggaaattgccaggtgcagtggctcatgcctgtaatcccagcactttgggaggccaaggcaggcggatcacctgaggtcaggagttcgagaccagcctggccaacatggtgaaaccctgtctctaccaaaaatgcaacaatttgccaggtgtggtggtgcacgcctgtagtcgcaactactcgggaggatgaggcatgagaatagcttgaatctgggaggtggaggttgcagtgagctgaggtcatgccactgtactctagcctaggtgacagagcaagactgtgtctcaaaaaaaaaaaaatttagaaggaaattgtgttggtcatcattgttttcaacacaagacatgagtttgcatccacagtgcaacagatgaaccaaacttcccctgacattcccatacaagtgatttgtctaatgaagttttgctgtgcctgtttttgattaacaatatctcttccagaaaaaggtagaattataaatgacagttgtttaaggtatattaataaaaccacattttgaaattaacatgggcttcaactgtattatatacttggttctaattagtggttgtttattagaattaatagtatttacagggaagaaagctcttaaagttagatgtttaatatgtggctttttttttcattttgcttacattaaacataattatagttggcattcatttgcatttttattttgcagtctcttgttttcagcagccactgtaaagcagtgagtggctactcagaccaggttgtccatcagcggagatcagctacctcctcgctgcgtcgctgcctgctcactgagctgccatcttttttgtgtgtggccagtccacgagtaagtgctccaggagggaagagatgaaatagatggcaataggagaaataaaccaatttttaagggatttatttcttaaacagaattgttttaaactatttggactttaagaaacatataaattctagtattttaaaatgtgggcatttgtgattctggcctgccccagacaacacttatattcaccttcatttgttgatttaagaatagttgtatggtcgatagcttctttttatttagtcaggggctctaaactatagtgggaataaaccatctgtcaggtagaatatatatcacccaatagcagggtcggggcgagggaaccatttgtcacctgtgttgaggttttgagggttttcatgagagggcgtcagattggtaaggattgggggagatttgatccggtcatatcacctcagtacagtctccagataacaaaaggaaacataacactccagcatcaagaaccttctcagtgttgtgttttcttgctttccaaagcagcctcacttggactgtcattcacatgtctgttccatctgaaaagtgactgttgtatcttctttgctattcaccatttgtccactgttgtttgcagattgggcttagtttctattgtggtttcaactttagcagttgtctgcatccttcctaataccctgtttatcaaaatagagccctcttgccattgctgacaagcattgctggaaaggctttaattggcacactggggttatttactttgcctacatcttccatcctcttttttatccatgttgatcagagccagagaaaagatctaccaagaagggaaataatcgaactgtggccaggttctgtggttagagccaagaatgaatttctgtcttcccagttcatttctttttgctccaagaggcaactttccgttagccaggaagctctaagaggttgacatttcttacccttttatgtttttctcttgtttctccactcatcttagcaagtgtactgtttttacaggtttgttggttttttttgkttttgktttttttaatgcttttgagacagggtttcactctgttacccagcctggagtgcagtggcattatttcagctcactgcaacctcaacctcctgggctcaagtgatcctcccacctcagcctcccaagtagctgggactacaggtgcgcaccaccgctcctggctactttttaaattttttgtaaagacgaggttttgtcatgtcgcccaggctattctccaactcctgagttcaagctatctacctgtcttggcctcccaaagtgctgggatcacagatgtgagccaccgtgcccagcctgttttcacagttctattaaaagaagaaggagccttttctgtctcccttgttaatatttttctaccattattttttatcagcttgcgttctttattcagtttatcaaaagacagaatctgacaggggacccctagaaagatgatgaatcctgttgactcctgcctgcctagatttctgtctgctgctcctgtgctatatgagtttaattcccttgtcactatcaactttgtttggtttatactggctatccagaaagtatttggattttgtacatatcctgttcttccaaagtattcttggtctcagaagcttaagttagtgcagggaaatgcactttttctaggaagcatttaaagccaagagcttccatagaaggcaggcttcagtctttcatggttgtgtggttggttttgttctcttagtatgataggtgtataccaagagacctaataaaaggaagtttagatttctgagagaggcacatcaagtctttttaacttctcctgttcccagtgttttgttttttggttgttggggttttttgtttttgtttttgagatggagccttgctctctcacccaggctggagtgcagtgacacaaccttggttgaatgcagccttcgcctcccaggttcaagcaattatcgtgcctcagccccccaggtagctgggattacaggtgcatgccatcacgcccagctcatttttgtatttttagtagagacagggtttcaccatgttagccaggctgggctcgaactcctaacctcatgtgatcctcctgcctaagcctcccaaagtgctgggattacaggcctgagccactgtgcccagcctgttcccagtgtttaaagagccaataaagatgagctctcttggcctgtaattgtatttatttgttgacctgaaagttcttcattttttaccacttggagctccccaaatatctataacccaccactctcaagaacagtcccactctctcacacatgcatgccccatctatactacttcagtattgtttttagaggagccagaaatcccagctaccatgcctgctgctgctgtttctctcaagaaaagtaaatgtagcttgaggaaaactctaattgctgtgaacatgtgttggcaagcagggagcaggagaaagcttttatcgtttggctgaaagggtgctcctttcccacttggcccctcccatgtttgtagagtttctttacatagtatgtgctaaacctgaaaatgggagtaattacaccgtgattattaggaggacaggaagaagagtttagatatctctatttcatacacagatctacaacttttacctttcagatcagtcctagggattcagatcagtgaataaggcaaaatttcatgagataccctaattatatcttatattgacttctaacccatctgtattggggagagagaaactgatgtcctttgaagccaaccctggccttgaattaggcaaattaatttctctgacacatgctatgaaaacttgagggttagttcaggaagaactgtgccactatggaaggaattataggagctgttttatcattagctgaggaaataattctgcagggttaataaattaaggccttaggaattattcttaccaaaatactgcagcgcttggagcggttacgcttccttcagctagagcaggaacatacgtgtcctcaggaaggaygcgctgaacgcttaagggggcagcccctgaaggtactgtagtttcagaggttaatgaagcaagaaaggggttagctcctgtaggacgagggagagtatgcattttttgtggggagggaagaacggtacgtcatgcttcatctctccttctgatcaaatcgggaggtcacttggggttagcagaatagggggaggctgtctgggatacagctgacttagaaagcaggatttactctaagtatattggacatttttgccctcttttggacctcataagtacattgcttacatacttacaacatgacattgtatgattctgaatatattaatatcttgatcctgggctcctggccaaagaagcctctcaaaacactgaaaaatatttcactaagaacagtgtcttgcaaacctcttaagcattcaatcctagacctggaagggtatcatcaaaatgaaaattgaaaaatagatgaaagtttataactggaaaaagttgttttgtttttaaactataagagtgcctagaaatgaatcccaggcagaaaaaccatttttcctgtttctctgttctttcatgctgagattctagcttttggcttttcatctcgagactatgagcccagagtctttatgtataattccaatataagttctgcttttttacaaaataaataaatwaataaaaatttttaaatcaaaacggttatctgtgagtataaaaattggtctgtatgaggkttttttgktgkttttttttgkttctttttttcgttttgtttttttttttttttttttttgagacagagtctcactctgtcacccaggctggagtgcagtggtgcaatctcagctcactgtaacctccacctcttggattcaagtgattctcccacctcagcctccagagtagcagagattacaggcaggcaccaccatgcccagctaatttttgtatttttagtagagacggggtttcaccatgttggccaggccagtctcgaactcctgacctcaggtgattcacccacctcggcctcccaaactgctgggattacaggtgtgagccacygcgctttagtcttactagagaagactaaatatgctttacttatctaagagtatgcatgctgttcaagacatatagaactggtcatatttctatagtctagactattactttttaaactttttatagaagtatagctgctattaattttgcaggtctgcgacacacatcctacatgggagatgtttgctctgacccacgatctgctgggatactgccatgtcaagtcatagaagggagagagacccaattttcatccacctgctttgtattcctgtatttatttgctttcttttggtccatatttatttgcccatgctcatgtattagtgggaaaaatgaataagttggaagcaagaaaacaagttccttctttttttaactttttttttttttttttgagacagtctgtcaccctgttgcccaggctggagtgcagtggcacagtcttggctcattgcaacatctgcctcctaggttcaagccattcttgtgcctcagcctcccaactatctgggattagaggtgaacgccaccatgccaggctaatttttgtattttttgtagagatggggttttgccatcttggccaggctagtcttgaactcctgaccttaggcgatctgccacctcagccttccaaagtgctgggattacaggtgtgagccaccatgctcagccgaaaacaagttccttttggagaggataaaggtgatatgagattctagtattgtttggataaactatttttgttgtgaactggttttggaactccaggcccagtttgctgtgaccctctgtagttttgcatctggaccatagatggcactgctccctagcaaactcagttcagcttcatctgcaagccagagtactctctggttattggtaaatgatgctctttctgtcacgttggtaccctccagaggcacctacagcccatggtcagctgttcatatgtctcaaggcagtatttctcaaggttcaacttgggacgctggggtgcttgtcaaaaacataggtctattggcccctccctcagttcttctggttcaaaatctacacttttggtccgcttcaaaggaggtccttatgtgtaccaaaacctgacagccatttccctaaagcttgatcaacacaaaaggagaaaagttaatagcaagatcaagttcccttggtgcctaacttccacgaaatgatagaactacctaactagatacagccggtgttttatgttctgatctctcctgtgctgtggcctttgcttctcatacgctgtttctccccatgtcttagtctagctttagggttcttctgagcaattctgcgtatgcagattgagtatctcttatccaaaaatcccaaacccaaaatgctccaatgagcatttccttagtgcatcatgtaggcactcaaagttttagattttcagattagggatattcaacctgaaatgggctttcagcatatttgtcagcgtgggcttgacagataatcacagcctccacattttaacaaaagctagccttgtcatcttcaagttccttaccagttgacttcacaggtatctgmatactgcctattagagtaggaataaacccagatagccaaagaaggataaaatctgtgtttctgaattggcaggagccctctactccatcgagtgagcagcagctgagtgttgtttggttataccttgtattgagataagaatttgtgtatagcctttggccaagccaggaaacaaatctgctactctctggcaattgcttccctaccctcccctgcctccgcactcccccttccccagtttatggcctgaaagaaagtttctcttccattaggtttgtcagtcagcaacctggtcagggaagaggagaaagctgttgataaatttgggagctttgccacaaaagcattaaagatgacttcaaatatgccaggccaatattctttagtttttaaatgaagtctgactagctgcagctccctttctggcatcaccatcatgcatatggttaagagaactttgccaagaacaatatctagcagtgaaggggaggtggcaaaatgatcagatatatatgcatataatagagttattgctgacctggtattctcatttatctgcaaactccagctctctttggatctttagtttgtttgcaggtttcattttataagaggttggctttttatctggaaaagctcactaagtcattcattagggacagcttagtgtgccagaacagatatttaaaaccactagtctaagaactatccacattagtctgatttcaaagttgaggttcccaaaaggcatagtgtgtatggacaacgtgaaagagccatctcatgtgaatctttaactgcaggttaccgcagtgccattggattcttactgcaatgaccgaagtgcagaatatgaaaggcgagttctgaaggaaggagggagtctggcagccaagcagtgtttgttgaatggggcccctgaactggctgcagactggctaaatagacgatcacagttcttcccagagccagctggaggtctgtggagcatcagacctcagaatggctggtctttcatcaggattccaggtgagttctcaatcctcttggaatgtgttcctcgctttggcaaggggagaaccagggttatcttcatgtggtcctttcagatatttggaatttactgttcttgaggtttctgcttccttttttggccttagtaattcataggtaagaatattagtaatttatgatgagtggagagagaaatgtttttagatttgtgcttaaatacactcctttgacatgcttacagctgagaaagaaatgccactcttaaaaaaaaaaaaggtagaaataaacttagtaggaaaggctctaggttgaatgagtacggttgtcttgtgccattgccagtggaatgaatgagaatgtcgtcactcacagaaagcctcatttaaatagcataaacagtgtcctacatgaagcactagagatctgaatgataacaagaggaaaaacagtgcattctatgccaaaatactagcagattcccagatcccctagggtcaaagtcgggggttgaaaggaaactaggttttcatctttgccttagtgagactacttttaaggaaactgaacacagataattcataggctcacgttctttgcttacacctgcaggcaaactggaatggtagcttggagctatagtgttagttttggttgtccaaaatctctgacattttgactacattccttttttttttgagatggagtcccgctctgttgcccaggctggagtgcagtggcgtgatctcggctcactgcaagccccgcctcctgggttcaagccattctcctgcctcagccttccaagtagctgggactacaggcgcccaccaccacgcctggctaattttttgtatttttagtagacatggggtttcactatgttagccaggatggtctcgatctcctgacctcgtgatctgcctgcctcagcctcccaaagtgctgggattacaggcgtgagccaccgcgcccggccaactatatcccttttactggcatgtaatggaaataaactagagctaagcattcaacagaggtcttcttctgtctctaagagataactggattccagtgtgtaaggcctggtttttccactttattttaactttgtcaagtgtcaaggggtttgccccagcctgttagtgctttgagaactccaagatgtctttctgtgtatctgaaggcagtattacacatggccttgtagctgacttaaagcacatgcagtgagtggaaatatattgtttgaaaatcagtgggggaacctaagtgtaaagcaagctggtaaggaaactacagaatcccaggcaagagrtgagcaccgttattgaaagaagcaagatagcaccttacttcttttttctcccttcttggttctggctcctaagttcccattacaggagtagatggcttattgctggcgttgtgggaatctcttgtggcttttcctgttctttgaaagaaaaatggaccttgtttaaatagcaggaagcgtctgagttctttttgcatcgataaaaagcaccagcctcactggctgtttactgtgagaaccaaccagctcctcaccccattgtgctctgtagactagctgggacagggcgggggttgggggtgtctcactggaaccctttatcatctctctttcctttatacttttacrttttctctttccctgagaagggttgcttccatattccttgagagactgaccaaaatcttctgggtttcacaccttttcttctccatgtttcaccagaaagatgtacaatcccttcaaaagtcccctttccttggaaaaatgagatattatttaatcttttgccctaattttactgccataggctacattctttttatctctgaacaggatcttacaccgtggatggtaaaaacctgtgtctaatgaaagtactataggattgtaggaaagtttgtaagagagtaggataggtttgttcatttaaacattttttaagctcctgttttattttatttatttttaacacccaatgatccagaaagctcctgttttaaagaagggtctgggcacaggtttgacttagcagaatcagctggatttccagagaagtgtgttccttgtgtctctgtatcctgcttagcgacaggtggagctcttgtccagtgcaacttaagtgactgctaaaaacttggctaacaaataccagccccagaagtcactctagtgtgttcagagaaagaaacctgtttttcctgcatatcttactaaggacaaatactagagactgattttctccatgctcaccagcaaatcagagatagtgttcattttgctgaagtgttttaaggctgttgctgaagtgtttcttcttagtcattttccttcagggcagtacaaagaagtccagtccatccacttctcccttccccacctacacaataacaagataacaagctgacagcaggtaccacttcttgcctcctttagtcatgttagagttctgtctttataagtatatgcacatctttatttctgagcttttctaatcctaggaacagttcattctgattagcaaagtaaagtagatgtgggaggcaggactgtttgaaaaccattgaatcatgattttgaaataattgaagtttctcaaaattcagacataaaacaaatttttatatgcattaacatttgtgctaagagagtatatctaaatggagaaagaagataagcaggctacagaaatcttacgaacttagcttgcccaccctcactcaagggctgaaaaatatgtggtctttttttttttcaccttgtgcttttaatgagaacrgaaagaagtatgtctaaagctgattggtagctctgtggtgaatgtttaggagctatcaaaattgagagaccttagggaattcaattactggagaagggtaattgtggtaagaataaaaccttaaaagttgttatgaaagctttgctgcctgctcagacttggaatttatacagtactccttgtctggtgccagggagagggcttagcagtcaattctgtcccagctgcagtcatttgattgtgttggtaaggagaccaacaaaaagaagagcatttcaataatctaaacaggaccaaacaaagagactgaacaaaggtgtgtgccacagcttcagggagcgggtggtggaaggagacatggcctggcagcattctgaaggtgggaaatggcaggctgcagtgcagagggagtaaacagccaggacctgtggctttgtagcaaaaacagagtggctgatgatttgttatggtgctgtcagcacatccgttcttgttccttgtatacaataattgtgcatttggcaaattgtggcaagaacagagaatgactgttgagaacttttggattgctgtcaacggtcagactgtggttctgaagaaaagccataggttcaaacccagaaactgaggaggaacattgtgtttttcttttagttgttagttgtctatataatatctccattctttctctctccctttttgtgtcctatggccacttccacatatactcttacccaaccccttaaacctaaactcttcccctcttaatgacagcaattgttcagggcatgtttatggaccagtctgcaaacaggaaactctacttcctgaatatgataggagttaaatgatactaactggataagatgaaaatttgtgagttaagtgttctttaaagatctgttgctgaaatgcttttcttgtgagaagaggaaagagaaagcacaagttagtgagtgagaggagcttcactgcagagaaactcaaagtcagtctttctgaaaagccctgctttctttattgaattaacatacaactagggttaacgacatttaccagtcaacctatttgcagtcctccaagagagctagttttgggtttaaaaaaaaaaaagggtaggggggctgggtaccatggctcagcactttaggaggctgagctgggaggatcccttgagcccaggagttcaagaccagcctaggcaatatggcaataccctgtttctacaaaaaaagagaaacaaaattaactgggtgtgatagctcacttgtagtccaagctactcaggaggctgagatgggaggatcacttgagcccaggaggtcgaggctgccatgagctgtcattgcgctgctgcattccagcctgggtgacagagtggaaccctgtcttgaaaaagggaaaaaaaagagagaggttataaatctctttgtttacttttctccaaaggcaggtaggatacgttctcaatgctttcagaactagcagaaacagatatctagagataggatgaacaaagaaaaaacaaaattttcaggtcacttaacagcagattgacatagatgtcacccatagatgtccatgtatacctggtgtcctctgagtaaggatgtggagcagggatgcttttaagtgccttaagagcacatgtctgattgggagtgatcagggaatctgcacttccccctttggggatgttttttcccagggcactcctggagtcgtgatattttcagggcgttgcattctccctttagagcacttttctgatctcatgatgacaagcatcttggttttagtgattgtggttgcatacagctttgcattgagtgattttgtcgcttcaattaaatacagttccccctcacccccttttcttctccccaggcaaggagagcctcatcactgacagtggaaagctgtatgcccttgatgkcctgctgactcggctcaagtctcaagggcatagggtccttatctactcccagatgaccaggatgatagacctactggaggtaggagagggaatcttggggacctaggataccttgacatttaatttgtaggaatcagatgtccatgactaatgttagtcctgcttaatgggagccccaaaactcccttttgtcttttttctttttcctttttttttttttttgagacagagtctcactctatcacccaggctggagtgcagtgatgcgatctcggctctgcaacctctgccttccaggttcaaggaattcttctgctccagtctcccgagtagctgggattacaggcgtgcaccaccacactcagctcttttttttttttttttttttttttaagtagagatggggtttcgccatgttagccaggctggtcttgaactcctggcctcaagtgatccacccacctcagcctctcaaagagttgggattacaggcatgagccaccacacgcagcccccaaaactcctttttttgattttacaatctataaagggagcagagttagctcctggcatggggagtatgtgaaggacttctgccccctgccctacaccagtgaaatagaacaccccttacatccttttactagggaagacatttcttaattttaaagtaggtcacagcctaggaatctaaaattatgtatggaaaacaagatttaggattagttctctgcgtaaaaaagcagagaacagctattcaacctgagttaatatagtgattctcaacttgactacatatcgcaatcacctgagaagctttaaaaaaatatggatttctagtcctatttccagagattcttatttattacatttgaaatgaggcctgggcatcaggatatttaaaaggtcctggggtgattctaatatgcaaccaggcttgacagctactaagttagtggaaaagatatgactgtgcaaggcagcttttgtttctttaattgcttctttgttgaagtttttctttttcttgtctgagtggtgacttattttttaagggacaggaggtcacagacctagaaacaggagagtgaaaatgagaacagataatcacaaactagtacaataagtctttatataaataaagtttgagaggcagaagtacctggttgtcagaagtacataaatgttctcatgtttttacatgtgtaaggcttcataccctcgccctgctacaccagggaatcgtaataagtaagtggaaattgtactgttattttccttatctaggaataaagcaatagggaccatatcagtacagaaggaatgaaggctagcattaaggagggttttcaggctttttggaagccaagattggcttgttgaattttgcaatgaatttatctgaaatcagtgggaggtttcttttaataatccggcaacttcttttagcaagagacataaatgatttttggggtcagtttcagcactaagtcttaggtttcatagccccttgaatgctgttgacagactaaactctctggtttgtattatgagtaggccacttattcctaaatgatggaagtgcttatgagtgaatgtaagtcaccataagagaggtgattaagctgttgtgtttgatgtatatattaactatgttaaatatcctaacagtagtaatccaaaataaaaggactgcctgcatgtctagtgttctgttcaaacagatgatcccaacagccaaaacaacatgagtaacttttcctgcagtggggctctttttaggtaaagtgcactttccttgtcctcaagaggcagggaaagtatagctaaagtagtgatcttcagctgctaacaattaaagaaaaagcagtrtgctaaggatactggtaagggacataatggtatttcttttccaagactatagtcttacatgttgattcatatgaaaggaaagttccaagggaatgtgaatgagcaatccaaaaataaactagcttcggtaggtgaaggtgagtgtaggtggtttaagtttgatacagcctttattatagtccttccctcggtgtatcgcacacttctaggttctcattaaatattactaaaataagtaattcagagtatgataagctttgttcaggataagtgctgtaaactctacccaccaggatcacttcctctctatctataatccaacagttatttttgggttatggacctagtgggtaggttttgcaaacaagcagcttgagaacctctctaaacatagatgtatttctaaggggaattccaaattagggaaatgcaaattcaaagcctgaatttcacaactgctgacattgcttagccatatgtataacatgcatcttggatgttgaaaccagaaaatgttgcaactatttgtatgttttaaaaactaaaatgaaattcttctctggtttccttaatactacactaatggttcttcctttaatttcttaaagtttattcatttttaatttgttttaatattacccactcaaatgaaccacattctgtattccaggagattagtactgaaatagaatttaatttatgagcatggaattacaatgcccaaagtgtttaccatatatttaatcattgattgaaatayaaacatattgtacgacttgagatggtgcagcactaggtctgcgtttttttatctttgaaagagtgtttttcagtcactttcataatagaaactctgagtattaacattcattaaagccatgtttcagcattaaagcatgacctggtacatgatcttgcagtgggaccttctgaatagatcctgtccattgagtatacttgatcttaagaaaaaacacaaacttaagtctcaaaatgttggttgttttgtttttatttcaggattttcctttttctcttgaaatcgtataccctcttcaaagagagaaagaaatgcttccaatagagtaagagttagaaactcacattgcgggtatcaaagctctgtgttgctgtggagtatgtgagcaactctctttcatccaacagcctttttgggtttttgttgtggttgttgttgttgttgttgttgttgttgttgttgttgttatgtgccttagccatggctggctgtctgtttctgggacttggcagaactagaagacattaagaattcacatacttctctatggccaggtttccattctgtgagaaatactagttttggacattactatttgcacagtattttttaaagtcattgatcgcttcctttttcccttgggtaaaaatctgactttaaatttcttgtgtatatatcagatcttcttccaaatagactatattcagaaatgttgtattctttcacatggcatccaaatagtagtatttctagataggggatttttaaaaggagagtgcttttgctgtaacaaatgggcactaagaaaaacaaaaatagtgaagaggagactgcttaatttccaagccaggagtttttagtttgccacgggcagaagccaaggacataaataggtgaggaaatcatagatcaataaatgtcattatgagtttattttatatttactgaatcgcctataggatcttttttttttttttttaaaaagagtctcgctctgtcacccaggctggagtgcaatggcgggatctcagctcactgcaacctccagctgccgggttcaagcaattcttcctcagcctccagagcagctgggatttcaggcgcgcatcaccacgcctggctaatttttgtatttttgtagagatggggtttcaccatgttggccaggctggtctcaaactcctgacctcaagtaatcctcccatcttggcctcccaaagtgttgggattacaggcgtgagccaccacgcctggccacctataggatcttggctgttgggcatactaggggaacacataatccctgtgcatttgggatggtggtatccagctggatgtcaggcagaacttttcctgctaccaccagttttaccatggttagggactcttctctgtattctagtagcaaagagcttttaacttattacagatgacttatctctgagtcttctcttttgagtttcattcctattgcatctagcaactgagtttgtagtttaaggaaataggccacttgatacttcctatacaataaagagtacttggaaagagttaatcagcttatgctatatgtggtgtaattgttaaatactgaaatccagacaaatcttgaactctaccaacatatgataatagtgtaatatagaattaaatccaggtaatccatacataatgacatttgagaccctgggttgtgtaacttgctcagtcatctatccaagcgcagtgcctcactgggggaagatttatcctgagcagacattctgtcatttatgagttggcctctcttagaaatgcaggttacctttggaagctgtgattctgaagatactgggaagctgggtattctgaaaatgccccatggaatgaaaagcaaattggattggcacacttgatatcttaagttgccttcttggccttcttccaagtgtactttacttcctttcaaaaaaaaaaaaagaaagaaaattggggccactgttaactagagttcttattaggtcttaagaattgtagaaggaaatttgtcagcttacaaccatgctgtgtataagcttttttaaattcttttttcctccatgctacctttgagcaaggcattaatgctaggcagatgcaaatattagttagacgtgatgtttgactttaaggaatctatttagtggaggagacatatacatacacaaatacctgtcagtgtaccctgatactaatgtcaaaatgaagcgtgaacagagctgaggatagcaagaaggatatgtttatttctaactgagtcactcttgaggaaagcatcacaaagacagtggcatctgaacttaagaacaaatagaatttcaaccatcagggagaaaggaatttgagactaaggaagccagatgtaaaaagagagatagaaaggtacaagagtagtccattgtgactggaacatatggcatagaagaaagggaaataacaggagtaggttgaagtcagattattttgggcccatgattgccttttgctagtcttgctccaaagggctctgtattagataagggaattacggctgtcatatttaactcttggttcaatttgcttggactgcagaaaaattgtaatagagtagccttttgctaatgatataccccaaaagatggaaaacagcatgtccaagaaaataaaattacatcagatctgcaggtttgtggaccatattgagtccttcccctaaattgttttatcaaaatgaaatctggttaaaatgaaagtcagagccagctttggaatagaagtttcagaatgaaaggttggtaataggatatataaacatttgcctttattttttcaagtgtccaattatcctttatgatgatgatagatcaggttatggacaggatatattaagaaccttagggttaaatggggctccctttctattttcatcttagtagtactgatcatcccttccatctgggaaacagtaggagggttaagccatggactctggaaccaatctgcttgagtttcagtcctaggtctgccacctactgcctgtgtcactttagggacyttaacatctgtaagataggagggacaataataacacctacccttactatatacccatgaaaattaaaaatctaaaaaaaaaaaatttaaaaaggaggtgattggaagctgttacagaacagatcatgaagattttgattgtgatctctgatcctgggggaaaaaaaattaaaagagaaattaaaaaaatatttaatagcacctaccttaaaggttgccataatgattggataaacataaccaggtaaaatagaacagtgactggcagttagtgaatgctcagtaaaactatcttgagttatgctggcagctctgtttgcatgccactgatgtggtgtgtggatgtgatctgtaagtcctactttttaatcagtggcatgcaagcagagcattgtcttctcaacttgtatagtaaaacagtggttttcagactgatgggatgtgttagaggaccagtagatattaagcrgagatggccactctttatcagtcaggatagcgatgcttttatctattttatatattagaggggttccgtgtaagaatttgcttgaagaaagtgttccgatgcttttaaaacaggtatgtttggccgggcacagtggcttacacctgtaatcctagcactttggaaggccaagggaggagaatcacttgagcccaggagttcaagaccagcctggacaacatagcaagacccccatctctataaaaatttaaatttaaatttaaaaattagctgggcatagtagtgcatgcctatagttccaactacttgggaggctgaggtgagaggatcatttgagcccaggaggtcgaggctgcagtgatccaagaaaactatacttcatcctgtgcaatagagcaagaccctgcctcaaaaacaaaacaaaaccaaaacgcatatgtcagccataaaaaatgatgagttcatgtcctttgtagggacatggatgaaattggaaatcatcattctcagtaaactatcgcaagaacaaaaaaccaaacactgcatattctcactcataggtgggaattgaacaatgagaacacatggacacaggaaggggaacataacactctggggactgttgtggggtggggggaggggggagggatagcattgggagatatacctaatgctagatgacgagttagtgggtgcagtgcaccagcatggcacatgtatacatatgtaactaacctgcacattgtgcacatgtaccctaaaacttaaagtataataaaaaaaaaaaaaagaacagtataaggaacttaaaaacaaaaaccgcatatgttctacaatagtgtttctcaaaattaatgctttcgaatcaaatgttattaaaacgcacgttacgccaggtgtggtggctgatgcctgcaatcccagcactttgggaagccaaggcggatgtatcacctgaggtcaggagtttgagatcagcccgaccaacatggtgaaaccccatctccactaaaaatacaaacttagccaggcatggtggcgcatgcctataatccagctacctgggagactgaggcaggagaatcgcttgaaccccggaagtggaagttgctgtgagccaagatctcaccattgcgctccagcctgggcaacagagcgagactccatctcaaaaaaaataaaaataaaatgcagattatgatttactaggtaagggatgtgtccctcagttctgcatttctaacagacctcaggtggtacaagtgctgcccatttgagggccatgctgaatggcaaggttcaaagggaaactgccttgccttccctttctagtggttgctctcagctgctgatataggctatcagaataatctttgaagctttttccagctacagctttattgatgtatgcttgataaataaaaattgtatatatttaaggtcgaccatgtgatattgtctctcttagaagagttcacatatacgatacaatattattagctctagttaccatgatgtacattagatctccaggattttttcattttgcataactgaacctttgtaccctttgaccaacatctccccatttcccctaccccctggcaaccacccttctactctctacttttatgagttttaactttttaagcttgcacatataagttgaaccatgcagtatttgtctttccatgtctggcatattttacttaacagaatcaggtttattcatgttgatttccttctttttaaggctgaataatattcgtgtgtgtgtgtgtgtgtgtgtgtgtgtgtatgtatatatatcacatattctttatccattcacctgttttgtttgtttattttgagacaatcaccctgttgcccaggctgcagtgctgtggcatgatcttggctcactgcagcctcaaactccctgggctcagatgatcttcccacctcagcctcctgagtagctgggactacaggcacataccagcacacccagctaatttttgtattttcagtagagatggggtttcgccatgttggccaggcttgtctcgaactcttgatctcaagtgatccacccacctcgaccttccacagtgctgggattacaggcgtgagccacttcgtccagccaaccaccacacctggccccaacctttgtcttttaggtgttttcctatagtgtgaggatgtagatgtcgctctattcagccttttaacacatctttccatgtccattttcttgttttttttttttttttgaagctatttactgaaatagactctaaatttactaaagcctgaagtcccactgctcgtcttagttcaagagctaagacttgaagcagtggaagggaataattcacttctgttgcctcagtaacaggctctctataatcagggttggtttgattatggtctaggattaatatccccggggttgtgctggccttgatatataaatatataaacagcaaaatttactagaagattcattcatcaatgcttttatgaggctagaagttcagtttaaaaggcaaatcaggcttggctcagtgggtcacacctgtaatcccaacactttgggaggctgaggtgggcagatcacctgaggtcaggagttcaagaccagcctggccaacatggcgaaaccccatctctactaaaaatagaaaaattagccaggtgtggtggcagttgcctgtaatcccagctgctagggaggctgaggcaggagaatcgcttgaacctgggaggaggaggttgcagtgaaccacgattgtgccactgcactccagcttgggtgacgagcaagacagtgtctaaaaaaaaaaaaaaaaaaaagaaaaaaaaaaaaagagtgcctgtgcaggaagcctacctttttgctaaaattataatctgtgttttgggtgtctctgtaaactgtcttggtattgtctagttactttgttgttctgattgcaacgttctgtgattggattagctgcaaaaggtatagcaagcctctaaggaccatcatcttgctatcattttataccttctttcttgaagtcctttttatccaaaacgccccctacccttctgccattagttcagtcctacgatatagcaataccactaagtatgaacttgaagctcactttattttatgctcctctttgattatcacagctcttaaggaaccactttgagacagaaatggtaaaaaattaaaaaatcaaaattaaaccaaatataaaacacaatgaagatgcatatgtcaatgagcttgtctactttgttgaccagcttcgcttcacatgtaccctagccagagacctctgccaagttcttggcactcactccatctaagaataggctgtcacatacgctgcaccagatattccaaactacagcaacctgatgtgctaaaatgccccaccaagtataagagttacatatgaaaatattgcagtataagaacatttgaccacagaaaactaattaacacaaacatttcccaaatgtagaaatgattagtctttttcaatagagaagttattttagaaccgaatcaactattttatgctgtttcttataaataggcagctgtgttgagtttttgatactagttcttctacaagtggactttttgtagcataatcagagataacaaaagaggaaataaatgttcatttggacataactataagaagaattgcaatttctaagaatggagaggcagtctctctattgtatcttttggagtctcttcattcttaaaagttgtaattcctcttgatgatgtcaagaacattctctgccatagaaaattaccttgtcttttgttttactctgatgcttaggcctcccataacagtgatgcatgctctgttgggagaaggaagcttaggctgtaaatttaagcattttaatcagtaaaggtttgctctggggaaacacattcgtttcagtgaatgttattcactgacaaaaaaagtaggtattttcatagctgtgaaagatatctggttgatgactgaaaaactattttggtttgtggaattttttttttttttttttttttaatgaaacctacaggaatttacaggaataagattaggttccaaactgaaattgagagtgattataatcttcagattgccctggattttcacacattggcagtaaactcatttacagattaacttcttgtactcttggggttactctctccccattctggttataatggcttgcctccagtgtggacaaggtagaagatgggtagatgcctgtggaaatcagaatacagtaatttgcatcagatttactgtgtccttttatcctggttggcaggaatacatggtttacaggaagcatacctacatgaggcttgatggctcatccaagatctcggagaggcgagacatggttgctgattttcagaacaggtaatgttcatgggaattacaaaaattatctttttaatttccctctagtgcttgaaatggtaagtttttttttttttttaaatgccaggacatctgagattgttaaggaatcaagatgtaattcctgccattttaagaagttactaaatctgcttatcataattcagatctatgtgtctgggagagaaaaagagaatatacctgatagtttgtatgtttgaagtatgctttcttatgacaccagtgcctatttctttggataataaaagaaatcatttctaagtatgaaccaagatcctcctcaatggataataggtatgtagaaaaaaatccaccagcctgtattcctcattgcttacagtagccatttcttttttttttttttttttttttgtgtgtgtgagacagtctctccctgtcacccaggctggagtgcagtggcatgatctcagctcactgcagcctccgcctccccggttcaaacaattcttgtgcctcggcctcccaagtagctgggattacagacatgcgccaccacatccagctaatttttgtatttttagtagggacaggatttcaccatgttggccagactggtcttgaaatcctgggctcaagtgatccacccacttccacctcccaaagtgctaggattatagggatgaaccagtgatcccggccactaacagtagcactttctgagtaatgacttaaagttattagtttgtttctgtgtttcattttgtataagaaaaagtaccttttattttcctgctttccttttaacatagtagcagtacagtgccttatgacaaattgcaatactgtacaatctactcagctggcagctctcagccacagtacctctcccacctgctaatgagcctatgaaatttcaattactgcctgctgaatgctgatggtttaccgagccataattatcctgagtgcagcttctcattgtaataggtagagtctggttactgctttctccaaggagaaagccaggctccactagtgacgggtctgttgaacttcgtcttcagttttcctccttagacctggagagccaaggaataaagcagatcttaatgtcagtaaatcagaacagctttgactttggcttttaattgcatggcctcttaatatttcacttctgaattcttattaagaaaattaagcacatagccattttatttagattacaatttttaattccattcagttctaaagcatagtttaattcagacataaaataatttggcataaaacacatccacaattcaacatagagtgtcctctgtttaaagaatttttcctaagttaaaactacacaccagaattccaggtgcctgtttgaccaacaataaggagaagatctgcttcaaacccgtttccatttgttaccctcgtgcagctgtgtggatagcctaacctagcttctcacctagcggaagctaccagtagattctaaaaccaattatttgaaacataagcattgtgcctccttattccaccacattgttttggcaaaaagaggaaaaaaaattactgggtgatcttcatcttttcttaattctgaaatcagtgatacatattttatcatgtcatgtccttacctactccagcctcagagctgcaacttgacaagaatcttatgtgcgagctatagactgtatgtttcctcagagtgcctgtattttctccagtcatgccagtatatctgtgatgtgggcatactggtatggggtggcatgctttgtgaattatgagaaaagccattaagtaataggtatttcacctgatactgtttttattttccactagtatatttgatactgtacatttaaggatctttttaacagtaatgttttgtttttcttcagtaacagttggggactttatagattataatgaaatgcctattgagaaaaatttgaaaaatatttaaagatgaaaataaagtccaggcacagtggctcacgcctgtaatcccagcactttgggaggccgaggtgggcgggtcatctgaggtcaggagttcgagaccagcccagccaacatggtgaaaccccgtctctactaaaaatacaaaaattagctgggcgtggtggtgggcgcctgtaatcccagctactcgggaggctgaggcaggagaatcacttgaattcgggagttggaggttagagtgagcagagatccaccactccactccagcctgggtgacagagcgagactccatctcaaaaaaaaaaaaaaaaaaaaaagaaaagaaaaatcacccacaatcccactacttttaacattttggtatatcctctagtctttaatgtatgtatagggttatatttatactattatattataggtgggattttgtatcctgatttcttctacttaatattctgtcataaccattttcatatatcattaaaaagcctttgccaacaacttttgtttttgtttttgttttttctgagacagagtctcgctctgtcacccaggctggagtgcagtggcgtgatcttggctcactgcaacctccacctcctgggttcaagcgattctcctgcctcagcctcccgagtagctgggactacaggcgcctgccaccacgcctggctaattttttgtatttttgtatttttgtatttttagtagagacaaggtttcactatgttagccaggatggtctcaatctcctgacctcatgatccacccgcctcggcctcccagaatgctgggattacaggcgtgagccaccgcatccagccttgccgacaacatttttaatgatcactattctgttaacactgggtatatataccacttttctattgaatagaaatatctactagaaatgttgagtgaatatttttgtgtataaagctttgtcactattttagattactgtcttagcatagattcaaacatgggaaattactgagtgaaaggataagaacatttaagactatgtatatttctttgtagaaaattctgctaatatagaccccaaccagagctgtagtatgttgacttctagtgatttgggcttctgagttttagagccgcagtcgttctcctggcttacccaattattagaaaactgggctgtgagacccagggctcagtatattttgcagtacctttgtggtggaaaaaaatcaggaggtgtataatttattacctctgaaatatcttacttaacttgggaagcagaattacttgggcagtcccagtagtagtgcacaatgattttgaaaagtttagctctaaaagagtggcattttcaccattaaattttacttggctctacttagtaaaaatgtaatttttcacagattttattaggaaatcttgcttgagccttcagactctacaacttagaattacttaggtaacagtgaatgttatttagagtcaacatttgggtaaccatcattttaacaccctctgtctaatattgggcaaaatggaaaaagagactaaagtctccttctgatccctgcctacattacaaactggttgcttagagttgggattatggcaaagaagtaatctatttctcatgtgtagaatctggactatgcatatgctgacccctccaaagggcggaaaatgctcaacttataaatttgagtgactgcaatcgcctgatatagagaaaaagacaggtgtttttggacacaagcactccttcccaaatattttaattactgttaatgaaggacatcaaaagaaaaaattgcagtttcaactggaaagccctgtggtcaaaggtcagccagagtaaacaacaacgcctataaaaagccatttacattcctttcatacaagatttatttatgaaggatccttccaggaaaaagtctgactgagactaaagactgtttggccaggatgtcctgacggggcagcattcagggcatgtgaccagtgcgtgatcctggaagccattcacaaggtctttgctctgtggtgctttggcctttgcttcccttcctcctaacccatgacctttaccaaatggatcctctccccattatctgaccactcagtgtgactctttggaaaacatgaggaaaaagtgactgtagcatggattttttctttgtgagtgttgtagagattcacagttgtctttcattgtggttgtttttcagtcattcaacaagcctttactgcagtcagctatgtgcctagcactatttgggtatgttggtgcaaagtcacctcagtgggttattaaagaagagtgagagcgagacctacacatgtctttgctgtgtggttttataggcctctttacagaccagccagatgcctagtctttaaggtctgttctaagagaccctgagttgagatgccttttcagcctcctagagagggcacccagaccaccatgctgccttctgggattttgttttctcctgtttagtcagagcccctaaaatgttaattcacattatcaatactattatagcgttattcagtagaaaggaacttcttagtagtttgatttagatacttttgttttttacagcagtatagtccacggtaggaactaatttctttgattataagaacccaaggtgtctgcaattcttattttttattacaatatgataaaattacattgaattcatctacctcatcatcacaaggcatcttttcaatacataattgatatccaaaagaaaccattgtatttctaagtttttctactaatttatttttacctacatttctttcactagtgttcttctgtatatagcccctatttgtaagtgattacatctgaactaatctctggctgtacagactatggaaattacccatctttttctttctcttttctttkctttcytttttttttttttttttttttttgagacagggtgccactctgtcacccaggctctggagtgcagtagaacacagtagagcaattagaactcactgcatccttgacctcccaggctctagtgactctcctacctcagcctcccaagtagctgagactacaggctcgtaccaccacacccagctaatttttggatttttgtagagacaaggtttcgccctgttgccaaggctggtcttgaactcctgacctcaagtgatctacccacctcagcctctcaaagtgttgggattacaggcatgagccaccgcacctggccagaaatttcttatctttttgcttctaatactttattttgttgtacttctcaaatgccttgtcttttcccaccagtcccccatactcccaccctgkacccattccctgacgcctaccccatgctcatattttgggtctcctcaagaattaacaaaaaaaagtcctagccattggatgaccccatcaactctcacgcaggtatcagagaggagcctttgattccttgcctttgtacccaccaaagcaggagaggaagatgtatggagcaagagcagtcttctcagtgcggaagtgggaaggattacttatcctttttaagagatgggatctcactttgttgcttaggctggagtgcattggtatgatatatagctcactgtatccttggactcgggctcaaatgatcttgctgcctcagcctcccaggtagctgggtctacaggtgtgtgccaccatgcctggctaatttttttaaaaaaaattttatgtagatgcagggtctttctgtattgcccaagctgatctcgaactcctaggctcaagtgatcctcacacctcagccttccagagattagtacggccctaaaaagctcaatcagtttttatttgaagccttattgtggttaaatactcttctttgggcctgtgagataccctgcctccttccatttacatcatcccatatctgtgggaaaatgtgtttaaaaactggcagatgcccttcaactttttggtttacactacacaatttaatcataaagatggcgttttatgaattaaataaatacaattacgaaatattaacctttgtgataaaatttaaggataagctagtagaacttgcatgggagcacaaagcatttggaatcactaactgagagaccgccacccgtggtctgttatccatgcctctgtaggaaagttgtgtttaattcaatgtaaataatgggcagatttgtacaggacatacctaccttagtgattaaccaggatgtttatttcaaaatagttctttcaccgatacttatgtttgacattgatacgtcatcagttagtcacttcagcagtattcatagcatcttcattttatagtccaggaaacagactgtcagcagtcaagtgactttaccaaggaagaatagcctgaagggatgagagcatcctgatgtcagtatgtttgtttctggtgttttttgttttttgttttccttactggaatccacaaaataaaattaattttacactgtgattttagtacctttattctatatttgaaacttcacaaaacattacttacctttatgacctgtaatgcattagaatattttctaatcttttttctttctttaattaatttcttaatgccatctaaagcaccaaactgagcccttatttgtgtgtgtgtgtgtgtgtgtgtgtgtgtgtgtgtgkagataaatcttagagtcaaaagcctgttctgccgggcacagtggctcacgcctggaatcccagcactttgggaggctgaggcacgtgcatcacctgaggtaggagaccagcctggtcaacatggtgaaatcccatctctactaaaaatacaaaaattagccaggcatggtggtgggcacctgtaatcccgtaatcccagctactcgggaggctgaggcaggagaactgcttgaaccaaggaggtggaggttgcagtgagccgagatcgtgccactgcactccagcctgagtgacagagctagactccatcttcaaaaaaaaaaaaacaaaacttgtcctttgtgatctggtatgggcttgttcccagaagacattccgtaaatatttgttgctcgagtgagtgacagtggtacctattggtttatttgtaattcagtgtttctttgaaagaacataggaagtagaaggaaactgagaaaaccatatttaatcatttgtatgtaaggggtatgttgacattcatccagaagtatttaattccagcctgtcttcatggactgatcctaaattcaagttagcacataaaagtcacagcctgggtcttagttatttgagtcatttttctgggactcaactttcttcatcttaaaatgaatgctttggggccccgcacggtggctcgcgtctataatcccagcactttgggaggccgaggcgggcggatcacgaggtcaggagttcaagaccagcctggccaatatgatgaaaccccgtctctactaaaaatattaaaaattaggcaggtgtggtggcgagcgcctatagtcccagctacttgggaggctgaggcaggagaattgcttgaacccaggaggcagaggttgcagtgagctgagatcgcgcctctacactccagcctgggcgacagaacaagactacgtctaaaaaaaaaaaaaaaaaaaaaaaagagtgttttggaataataacattagtccccagactattataagtcatgattcttagagaaaaccaggaagctaggaatggtttgatttaaaaatatgacagtgagagaggtctgtacatctatggtaacatttttctgttatatttgctacatgtttatacttgtgttgcctatcagtcatctattagtgggcagcaaaagtttatctgcaaattggaagatgacctccatgtttggttgtaacaacagagcaacattgtataatgctttacagaaatacagtcaggcctaggtaaccaccaaaactctttttagtcctagactttatgttctgtattcagagatctctctctattgatacatgccattttttcttttcagtttttcctttaacatatctctcccttttctgcaggaatgacatctttgtgttcctgttaagcacacgagctggaggactgggtatcaatctcactgctgcagacacagtaagtaatgagagcacaatcaactagatatgcaggttttctactatgaaacctactatgtaggtttttctaatatggcattgtttgttttaccctttgcttttgtgtcacaaacttgcaaactttttatttctttgcctcttgtgttaaaagactctagttgctctttgactggaactagagtattttagctttccttatggactttactattcattttctttgaacaagtttttttgtttttgttttttgagatggggcctcactctgttgcccaggctggagtgcagtggcatgatcatgggtcactgtagcttcaacctccccagcctcaggtgatcctcccacctcaccctcccaagtagctgggactataggcatgcgccaccatgcccagctaatttttgtattttttgtagagatggggttttgccatgttgcccaggctggtcttgaactctgaggcccaagtgatccacctgcctcagcctcccaaagtactgggattacaggtgtgagccactgcacctcgcctgaataagtgtcttacacattcattcgacaaatatttcactaatgcctactatgtgtctgatactgttygagacatttagggtacatcagggaaaacagactggaaaaacaatcagtccatccagatttgttttaggagctataattgaacacatcagaaaggattgttttgttactcttatgcattattccattaatggaaaaacccattttttgtatcctgaacttcaaaaggtggttggagagcaatgaaaagggtaatttcaaaaataaagtagaaaagatattccaacaaattatccactctttcctacccagtcttcttgcaggaatgcttcagtgtttgaaagggtgaagaaaagaggattcctggctgggcgtggtggctcatgcctgtaatcccagcactttgggaggccaaggcgggtggatcaccaggtcagaagatcaagatcatcctggccaacatggtgaaaccacgtctctaccaaaaaaaaacaaaaaaaatagccgggcgtggtgacacatgcctgtagtcccagctactcgggaggtgaggcaggagagtcgcttgaacccgggaggcagaggctgcagtgagccaagatcatgccactgcactccactctgggcgacagagtgagactgtctcaaaaagaaaagaggattctttttgaatctcaaaattattgctaagattcaaatatatttaataagaattttagtaactttgagatttaaaaatacgtaaatgggaaattattttataaaaggcatgactctaaaaatggcacttaatgtaactatcgtggtgcctctctgacatatagaacatcaaaatccccacaactgtgaggagaaagcaaactcatgagggtagtggagaaatgaggtgcaagagtgtagaggcttgaatagattcacagcagcagggggaatctctctctctctctstctcactaatctgatactacacattctgtaatagcaactataggatgcaccttccttggcatctaaactttcagttaaccaggtacggcaagacgtcagcgcctgagggccactggaggcattgctgggtagctgtacatcatcagcatctgtcatactatgggagggctgtcagtgtggcatgtgttgttcctgtgggttctctgatgtggtggctcacttgagccatatcacatagtttctaccatatcagatagtagaaacttgcctttttccttgttatctcttggttccctgctctctgtatcttttaagaatttcagcatagtcatactctcaatgtgagtacaagattcatcactttgtcccagctgctcttttggactccactctcagttcccggcttcatacctgttgatccaaatccattctttgctatgctggtactctgttagtttctctctgccctttattaatcatgccactcctttgattaaaactcttcaggaattcttcatcaattataaaataaagtataaggctcttcatytgtgtcctttatctacctttatagcttaattatcagaccactttcccttccaaattttatattccagaaataatgattgacttctagttccctgaacacaccatgccatatcacactgttggataaactgttccctcagcctaagtcatcctcccatgagtctcctcttccacctggtgaacttctgtttgttctttaaaamcccattcaggtgtcaatattcctttcccagcccctccctttattcaagttaatcaaaatacattgtaagtaattattttacatactagactttggcctcaacaatggaaggaagtcaaaagtctgcatttctaggctgaacgcggtggctcacgcttgtaatcccagcactttgggaggctgaggtgggcagatggcttgaggtcaggagttcaagaccagcctggcctgcatggtgaaaccatatctctgctaaatatacaaaaattagccgtatgtgctggcgcatgcctgtggtcccagctactcgggaggctgaggcaggagaatcacttgamcccaggaggcggaggttgcagtgagccaagattgcaccactgcactccagcctaagtctatttctagtacctggaacagtttgttcatttgttcattcattcattgattcattcaacaaatgtttaatgagcatccaccaagggcccagcgttgttttaggcactgggaattcagcatgcaacaaaacaaagttccatttctatcttcatagttactataaattacatttccagtggcaggagaggagacaaagcataaagaaatggaaaaaatactgataatatggggccaggtgcagtggctcacacctgtaatcctaacactttgggaggcagaggcaggcggatcacaaggtcaggagttcgacaccagcctggccaatatggtgaaaccctgtctctaataaaaatacaaaaaaatttagctgagcttggtggtgggcgcctgtagtcccagctactcgggaggctgaggcaggagaattgcttgaacccgggaggcagaggttgcagtgcgccaagatcgtgccactgtactccagcctgggtgacacagtgagactccatctcaaaaacaaacaaaaaactgataatatgaatgctatgaagaaaaattcatcaggtaaggagtggtagcatgagaatgatcaggggttgctgttttatatggattggtaaggcatctctgataaggtgacatttgagccaagatctgaagaaagtaaggcggcaacctaagcatatacctggcagaaagaagagcattccaggcagaggagataagtgcaaagccctaaggtgagaacatgcttggcataatcaagcaaaaggaagcagcccagagcaggtagaacagaatcaactatggggagagtagtatgagatggctattgcagaagcagatcatataggggttagtagccatggtaaggactttgagatggggagcgattgcaagaatttgaacagaggagtaacatgatctggtttgagttttaaatgcatccttctagcttctgtttagagtgggagaaaaaaatgaaatgctacaaggagacataaacaggaagatcagttaggagtatcagaggttaagtggcaatatcacccaggcagcagagtctgaagttcaggagaaagattggggttaaagctgtattttctttttctttttctttttatttatttatttattttttgagacagagtcttgctctgtcattcaggctggagtgcagtggcttgatctcggctcacttcaacctccacctctcaggttcaagtgattctcccacctcagcctcccgagtagctgggactacaggcgggcaccaccattcccagttaatttttatatttttagtagagatggggttttaccacgttggccaggctggtctcaaaactcctgacctcaggtgatctgcctgcctccgcctcccaaagtgctgggattacaggcgtgagccaccactcctggccttaaagctgtattttcaaatcatcaggttgtagatgatatttaagaggctgtatgaggtcacctgggaaggtctagcacaatttcattttattaaagtatgtttctcttcttctcagcttgcctatctcaggtttagtctatggtttcttaaggaatagtttctccggttgttcatttaaatggttaaagaaaaaaaaaaactaagcagatttaaagagagatctgcaccttgcttccaaggttcacatagtttgccctgtaggagtaaagagcgtcctgccagccacaaagaagcaaagtaggcctaggcctctgatccataagtagaggaataagagtaggaattcttttttcatcctgaaggccagaaaggggctctaggctgggcatggtggctcatgcctgtaatccctgcagtttgggaggccgatgtgggtggattgcttgagggcagatgtttgaaaccagcctgggccacatagcaagaccccatctgtacaaaaaagttttttaaattagtcaggcgtggtggcacatgcctgtgatcccagatactcgggaggctgaggtgggaggtttgcttgggcccagaaggtcaagactgcagtgagctgtgattgtgccgctgcactccaacatgggcaacacagagagctcctgcctcaagaaaaaaagagaaaggctctgaatactctgatttctgaattctgaagtaatttacattttaattttgggggaagggcttggggattcacttgtaaatcagaagctcctggaatagttcttagaaaaatgagacagcaagattgaaattaattccgaggatatactgtgtgtgtgttgctagagaaacagtaggattagttgcttgtctggcatttttcctttgccctgagatttatttagctttgggatttccccagaaccatttatggacaaggaagagattaatcaacctaaaaatgtcaggaaaaacctaatgtcttatgattgagaatgcatatgtaaaaatgtatttataaatagtgggactctatctggcctacttggttagtaaaaacatggttttagcaaatgatgtatggcagctgccttttactgtgtcactgtatatgcttcctgaagtagggttgtctttgcatttgactctgtttagtaaggggttgttataaactgcactgtttgtgtttctgtgtcagacctgttttaaatgcttatgtgtagtgagaatgaagagcttttctccctttgcagggattcaagaagtcctgtctcacaggacagcttttagccctctgcagaggccgaacctccgcttattctcttgggagaaaaagctccaccctccaagtgttggtccaacttttcccacttgttcttctagaaattttcctgtttcagcagggcccggtggctcacgcctgtaatcccagcactttgggaagcccaggctggcggatcacgaggtcaggagatcgagaccatcctggctaacacagtgaaaccccgtctctctaaaaatgcaaaaaatgagccgggcatggtggcggrcgcctgtagtccctcccagctactcgggaggctgaggcaggagaatggcgtgaactcgggaggcggagcttgcagtgagtcaagatcttgccactgcactccagcctgggcgacagagcaagactccatctcaaaaaaaaaaagaaagaaattttcctgttttaaatctcattctctcatcccctgaaactccttctcactgacctatacagccaggcccctctaccgcatggtaactctcacctctcttcccttgtgcctgccctgcttggtgtttacaatgtcatgaaggcattgactactaattctccttagtcactgctgggccacgctttgtggattgacttgccttaatctttcctagttaaatcagttgttctaatcctttaattgttacttgtttttttctggaatgtctcactgagctccataaacccaactgccaaatataggcatcatccctgttccacagtggtgcattgtctccctcaccactccctccagttcacatcacggttaattcagtgttagattagatggtaaccatacatctgccttggtttttagttctctcactcttgttcttaacctattagtttgtacgtatttcatattttccgctgcacaggtatttttctaaacaatcctatttttttctgttttcctcccaaattccccacctcttggaatccatgtaaaggataaatatcttccatatttggagatttttgaagttaagattgtaaacccatctccttaggctttaatcttactgttcatgagctcaaaagaacacaagttgaatcaggtttggttgccactgggtcttctaggaaaaaatgtaaatgttaagacagtacttatgaaacaattcattatatggctctccctccacccacctccaccacccacatccccacattatgaattcatgctgaaccatagcctcaagcttagacagctcaagatactgtcttttgggtgtgacatcagccctcaaattccacatttgtggtcattttaaatacattgggcatcatgggacaacatgaaccagaaaaaaagatgaaaaaaatacactgggcaagtaatgttatcctctagtccaactgaaggtcttcacttttgttagctctgttctccctgaaagttcaaacttggtcttctagttcaaacttggtcttctggaagttcttatgtcctctttgaaaccaaaatgtcgtgtggtcaggtttgttaagttcctctagaggcaacaagcattgtgcacttctaaatcttaggtttgcaggacactagattaacaataagcattcacggtgactttctttcgccagcagtttacattgttcttcccaaggattctaacctgtgctaaaaatggagggaaaccattttggccaggtgcagtggctcatacctgtaattccaacactttgggaagctgagatggtaggattgcttgagcccaggagtttggggctgcagtgagccaagatcatgccactgtacttcagcctggatgacagagcaagaccctgtctcagaaaagaaaaagagagacagaaacagtttcaagaaagatgactcactctttcaaatagtacacatgaaataattgacaccatagaagttagtgattaagtggggacttggaccaaggtaggtaggcaatgccaagttttgttactactgtaggttgtggagggagactgttaggtcactccccaccccagccccttgctgtgatttcagaccagtctcttccttgcttgtaagatggaggatagacataggatttttttttttttagaattcagtgagagatatatgcatactagtcctgggctcataagtacccaacaaattttagccattattatttctaataggaatccagggggaatagggataagaaaagaaaaggagacattattataggcaagagaaaacagggcgagcttcctagaagcttgaactaaacctgaaaggaccaataaagaagagttttgggattctagttcagagaaacagcttgagcaataagaggtgtacacaaatgtattataagccaggaccactgaagagacccatctgactaaagggaaagggcatatttgtgttaggaaagaatagaaaataaagttggctctctatagcagggcctgattatttaggagagtttggacatggtggcaggcacctgtgatctcagctactcaggaggctgaggcaggtgtgtaactggcagagagctggagtggcccacagtggtagccaaggtagactgaagaggaaagagaccgagatctaagagtcctgctgatgtaacagagtgctaatccagatgtaggttgtgagggcctggtctagaatggaaacagtgggattgttacagtagaaaggacaggttcatttttgaagcagtggctggatttggtgacttttgattggatataaaggacaacacatgagatatgagggccattttgaactggtccgccatgttggatggtagcctcaagggttgaggactgaggagtttgttttaggatcactcacttagtggtgatatattttgttgttaatttgtttgttgctcagcaaactagaagtcacttccagagaaccctttaaacattccatcctgggaattcatgggctagtaaatgactgttgatgagagcctgagaattctagggaaagccatgcctgtttccaacatagccccagtgttttgttttgtgacagagtttctctcttgttgcccaggctggagtgcaatggcatgatctcagctcactgtactccccgcctcctgggttcaagcaattctcctgcctcagcctcctgagtagctgggaccacaggtgcctgccaccacacctggctaattttttttttttttgagacggaggctcactgtgtcgcccaggctggagtgcagtgatgcagtgtcggctcactgcaacctctgcctcccaggttcaaacaattcccctgccttagcctcccagatagctgggattgcaggcacgcactgccacgcccagctaatttttgtatttttagtagagatggggtttcaccatgttagccaggctggtctcaaactcctgacctcaagtaatccactcgccttggcctcccaaagtgatgggattacaggcgtgagccaccaagcctggttagtttttgtatttttagcagagatggggattcactatgttggccaggctggtctctaactcctgacctcaggtgatctacctacctcagcttcccaaagtgctgggattacaggtgtgagccaccacagctgacctgttttgtttttgagacagggtattgctctgtcacccaggctggagtgcagtggtacaatctcagctcaccgcaacctctgcctcccaggctcaagcaatcctcccacctcagccttgtgaatagttgggagcagtggtgcttagttaagcaatgtgatcttggataaattgtctagctcatttgtgcctcattctcctaaactacaaaatatgtgagtcttaacagcatttaaataatgacgattatgggattttttttctcagcacaaataacagtgataattctgggatttaaatgagttaatgcacttagaacaatgcactrtaagtgttaaccgttaatgttattaatgtactaaacactacgttttaactattaatattattgccactctttttaagtgaaaactgaaaaaaataaaacaggagcatgtatcttttgctcagggcatgtgaaggaacggctttgtatcttctaagatgtatcttacttagctcaatatcatagaaacgaatcagaccctactgacgccaaactcgcaaacagacaattggctgggttgctctcagaatttctggtccttccctaagagtgcttcagtttttgctatattctatgcaggtgattttctatgatagcgactggaaccccactgtggaccagcaggccatggacagggcccaccgcttagggcagacaaagcaggttactgtgtaccggctcatctgtaaaggcaccattgaagaacgcattctgcaaagagccaaggagaagagtgaggtaagcacaagagaaagaaattcctacactggtggagcaaacagaaagtccaaccacattgactgcattgagactattttaaaactctcttgcctttcattggtcctgacgaaactacartttcttctgaatagaaaataaaatcaggtcccatgcaatagcaattttgacttccctggccatgcctcattccctttcccctagaatggtttccatagcctggatccagctgttgttcatgtggagactgacaccggtaatggcctctcgcattcagtggaagaaggatggacattttttagttcctatcctagtactctcagcttatctgcctctgaattgtatgccaaatttgttattttttgtttttttcatcctgattcagtagccttagattttctagttagcagttccaagcaaagaagttatcattttccttctgtcggacaaataatctggatgagccaatcagatgaactgaaatgaaaagggagwaaagaagaaataggaaaccagaggcctcccctgaggagtgggttgagaacgatgtgtatctttttctggatatttgccataagggaatggatgcctggaggtgacattttgatctgctttggtgtagattcagcggatggtgatttcaggtgggaacttcaaaccagataccttgaaacccaaagaggtggttagtcttcttctagacgacgaagagttggagaagaaacgtatgtactctaaacctctatacactcccctcacgtatctgagaatggaagaggtacttggctgtgtgccaagggtaggcaaagccagaggctgtatttagggaaagtatttttgtgctcatattttatataaaaacccaaacaagaatgtgtttgtaggccaggcatggtggctcacgcctctaatctcagcatttcgggaggccaaagtgggcagatcacctgaggtcaggagtttgagtttgagaccagcctggccaacattgtgaaaccccacctctactaaaaatacaaaaaattagttgggcatggtagcgggcacctgtaattccagcactttgggaagctaaagcagaagaattgcttgaacccaggaggtggagattgcagtgagccgagatcatgccattgcactccagcccgggcaataagagtgaaactccatcttttaaaaacaaacaaaaacaaaaaacacaagacggctcacacctgtaatcccagcactttgggaggccgaggcaggtggatcacgaggtcaggagttccaagactagcctggccaacctggtgaagccccgtctctactaaaaatacaaatattagtcgggcgtggtggtgggcacgtgtaatcccagctactcgggaggctgaggcaggagaatcccttgaagctaggaggcagaggttgcagtgagccaagatcgtgccattgcactccagcctggacaacaagagcaagattccatctcaaaaaaaaaaaaaaaaaaaaaaaaagcattgtggagtaraaggcaaaatttgtgtgtattttaaaggtaaatgtggcttcaaataatgtagcttgcacaaggaaggcagctgactccttagcagtagtgaatttgctcttctgcccagaaaaatgtttttatggaaaagttggagaagcacgcagctgtaaccatacaaaccctcctcccatgtgttttctggcttttgagagcattgggtttcagattcatcctgtgagcctctgaagccttccacagcattagagcagaaagtaagttcacatttgccagcaccttctaaaacctttcagaactctacagccatgctcaatgtgtgcaaagcagagattaaaaggctgaaatgaaaaagggaaaaagaataacatgaggaaaggcctataataatttttttttagacagagttttgctgtgttgcccagactggagtacagtgtcacaatcctggctcaccacaacctccacttcctgggctcaggcagtcctcctgactcagcctctggggtagctgggacccaggcgcgtaccactgtgcctggctaatttttgtatttttatagagatggggtttcactatgttggcccggctggtctcaagctcctgggcttgagccatcagcctgccccagcctcccaaagtgctgggattacagacgtgagtcaccacaccgagccagcccataatgcttaaaataagagtgtgatttaaacccaaaattgagaatccaagttagaaaaccactggttatctgccttaaacagatagamgtgatacttggaaaataaacatcaggggatatggccaccttaattaagagagtgaggattatgattaccacaggtacttcatcaggtcttaattcattttcttgatagtgaggctgcggcaggaagagaaacggcaacaggaggaaaccaaccgagtgaaagagcgcaagcggaagcgggaaaagtatgcagagaaggtatttccagcctggaatggtggataggggctaatggggcctggggtacttaccaaaaaggctttggggtacatggcttctcatcttggttactggttgctatcaagctccagctgtgtatgatcagctacatttctgggctgactcacgctttgctcaggagaaatgtggccttggtagatctgtactctccacacaaactcacccttacggtggtcacagtttaattatggaaaccatttgtcagggctgttacaaagcgtggaaggctaaaatgtgactaagatgggcattacttataaggctccatagaatcttagaaggggcctaagaggtcatgagatccacaaacctaccataattctgctagtgtaccactcagtgtcatctgtcactagaaaaataaacccccggtttatttctaaatgtctgttcatctstttttctctagttcacaccaaggatttgaactgtcttaaaaatttgtcttaaaaacagatatgtagaaaatatattgaaagcattggccctctcttttgtgggactgcattcagtcagcctcaataagtgctggatgtgccagcggctggtgaggctcttcggcccattaggatcagggttggtgtggctctggttcagtgtgactgccccaactttaaactctattattgtggcagatattcataagctctttttttttttttcttttgagctggggtccaatttctgggctcaagtaatcctcccacctcagcctaagtagttggaattacaggcatgtgccacagtactcgactgaaatacacacaaactcctgttaagctatcccttcttccttatgcagtttttcttccgtaaaaatatgctaattgagaagtttataaactaaagaataaaagttctgttatccttttcttcccaaatcccgcttttcttttggggtgcatcctcacacgttttccatatttatccgtgtgttcccagaagaaaaaagaagatgaattggatgggaaaaggagaaaagagggtgtgaacctggtgatcccatttgttccctcggctgataactccaacctctctgctgacggagatgactccttcattagcgtggactcagccatgccaagccctttcagtgaggtgaggctccttttagatgcctgcatcacagccgtaaggagtgtcctgaccgtgtagcagggacacactgctgggcagtctttgcttctcctggagttctccagccttgttgaagtaggttgcacatgaggtctgtaaggagaaaaacaaatgaggacaggttggtttctcagaagccaaagcagcctcaactgtgaagcatgttcctagctgggtgcaaggccatgggcggtgagyacagggggtcgtaatgatcttaacccttcctcttctagatctccatcagcagtgagctgcacactggctccattcccctggacgagagcagcagtgacatgctggtcattgtggatgacccagcctcctcagcccctcagtctcgagctaccaactctcccgcatccataacaggctccgtctcagataccgtgaatggtaattgctgctgtcttgtacagcttgggcctggtccactgcccagcactggtttggttgtgggtaaggtcctgattccttctaggataatggtatttttattctttcaatagctttgtcaagtgaaatgagaaaacgaggtttagggaaagcaaaataagtaactttataaagatttaaaacttttctagtcatccccgactttcagattcaccattatttttgctgatttttaattaatgttagcttttctgggcctttcctcactttgctgtgtggggtctagtgttgctgccatttcttggggagctctgggttcaaaactcgagggtaaaatttgactctccaaggcaagagcacattagagtgtgcagatgagtcccaggtagcaagtcgcttccctttgtaatggacaaatttaaagaggaaactcaggagtaatgtaactgctcttcagaatgaaaagcagcttgaggagttaggatgttttcattgtttagaattcttagtattctgtgtgactcagtggtctagccatcattaagtggagacatagacctcctcatgggtcctaaaacaaatgccctaagagctcgctttccctgtcaggagaaggtgatgttaacatcttggagattgactttttttttttttctttcccttttggcccatttgttcccacaggaatttccattcaggaaatgccagctgcaggacgtggtcactcagcccgaagccgaggccgccccaaaggttcaggaagcacagccaaaggagcagggaagggccggagccgaaagtccacggcaggcagtgctgctgcaatggcaggagccaaagccggggctgcagcggcctctgcagctgcctatgccgcatacgggtacaacgtgtctaaaggtacagaagcccagggtggctgcagactttgttctggtcagagacmgtctagaaattctgtcagtcaggtagaacatgtaggaaaccctgaagccgggagctttcttcctagagccccaattggggttcttcttctttgtaataagcactgttgactcaccccttgccctcctgacggtacagggctgtctgtggattggaagtagttgtaaaaagggagagctgaattgtgaactgtactactttaaacattctgaatttttcttgctttggggatttgttttcttcctaggctttcatttctgagatccacattttagtaatccaaattagcatagttaacgttcattcagctgtgtgatttatcacctagatatgaggcacctgctgcatgcataggcgtataccacatgggccaggcacagtggctcacacctgtaatcccaacactttgggagactgaggcaggcagatcacttgaggccaggagttcgagaccagcctggccaacatgaggaaaccctgtctctaccaaaaaacacaaaaaattagatgggcgtggtggctcacgcctgtagtcccagctacttgggaggctgaggcacgagaattgactgaaccctggaggtggaggtttcagtgcactgagatcaggtcactgcactccagcatgggtgacagagcaagactctctcaaaaactaaaaaacgtaaaaaggagtattccacatggaccttgctcctgagtgtataatagcaatgagaaggggaagccatgcatgcagtactcttaacagcaatccacggcaaaatacaggggaatgaaaagaaggcagccacagcagttgtaggtcaggaggagagggaaccatggtcctgctgataagttgcctgtctgtattcaaaagggaggagaagaatgaggaaggatttggactggtgacagagagctggcagtggccaaggcatactgggggtcactgagcagcttaggttccatggaagaggagcagtaggagtcaaggttgtaaacacatggcgaggcctgctgggcaggagcttagcagatgtgtgacaaggggctgcagacagtttgaggaaaaaagtggctgttgtgaccgtgatatgtgaaggatgattgtagctataaagtacaggacatttgagtgtggtgagaaagagagagccacttacagacctttcttcccattcaatacgtgggcttagtatgagctcatagttgtagcaagtaaaggcatactagtatagaaagtgcttggagtgtagtaattgctcagtaattgttagtttacttgccttttctcttactgcagaaatctcagctttcatttattggttcttccaggaaatatgaagtatgatagaggaaatatgaagtataatagcctcgcccagtgtttcttagccctttgccaacttaccacatccttggaaaacaacagtcatgccagtagtccaggctgccgtggcagggtctcacccatggctggggcattgcatatactcatcagggtttctcctcagaacctgcactgtgtagagggcagaaagggtgagggagatagagggggtagagcagcacaagaaaaaccaacagtgcttggcaactggaaatggaaatcaagggaaaggagtggttcagagagtacccgtggatgaggagagagacatgtctgcccatcaagcacttagaattcttttttggaaagtaaaaccagtacatatgaaacaattgaagaatcaatgtgttatcacatgtaagtggatttggcttatgtaggaaaaagggaagttcactgttgcccagggagtcatcactgaagatgggggatttgagctgtgcccttgaagtgacacaggccttggagagcaggggtggccattgccagcgcaaggagaactgtatgaatatagacacaggatagagagygggcagccttgtaccctctggcccgacttactggagagtagcaggagcatgaaattgaaaaggaaacatcttatcaaacttgatgttccaagaaagaagaaaggaaaaacctgtttgtgcctagtaagttacagctctcatcctgtaactttggtgtctcagattgtaaaatgtgtgctctatctrgagtgtcaagatgaacattttaccatctgtggatgaagtagtatagagagggttgggtaggtatcattttctcttaaaaatctattcctcttactgaaaagacagttgacaggaagagcaagcaaacatgccaagaagttgttagcaaggagtggcagggaggaattgcccaccacttctcctccagctcagactctggtaaccaaggccacaggctccaaggaagcttacgcgggaytggtgcttacgttcttgtctctctcygtccccacaggaatctccgccagcagtcctctgcagacatcccttgttcggcctgctggccttgctgactttggaccttcaagcgcctcttctcctttgagttcccctttgagcaagggaaataatgttcctgggaatcccaagaacctccacatgaccagcagcctagccccagactctctggtccggaaacagggcaaaggcaccaacccctctggaggacggtaaccatctgggccctccgacttccttcaaccaaaccagggctagagtcctgacctgccagtggtctttggatggcttgcccgtgcagcatcttgcatcctgagtcagaagtggaaatgtccagcaggggaaggacaggcaggtggatggtgtgagcacttttatcatctgtgtctcatcaggagcatctggggtgcctgtaggaggaaggccacagggcatggatcagccccactgcatctcaagtgaactgtatagccaagtcttaaacctctcacggggcaagcctgacacagaccccctttagatgctcaggcatactgtttccatcccgattccactcttcggctctgacacgtcccttgcaaagtctccgcaggtgctgtgaagagccttccatggtagagatttctcttaagagtgtgatttctcatagggctagtaagggagattgtatacctgttgtccacagtcttcaggcagctccccaggtctctgaaccccagagtgtcatcattggagagagcagtgactgcgagagatggtggaggccgctaagcatggtagaggctagaggaagtctatccacaggcagttgtgttcccagcaattcctcccatcctgcatggttcacaccaagagaaccttcagatcctaccagcaaccgtagcaccttccacccaggggactcccagaagccagtaaagagaccaggagccacctcaatcagcaggacagcctcactgcccctcttgcagagtcccctttgcccatcctgaatgcacagtctccctgctcatgcccttcagtcccctgcttggctgtatgcactgtctatattgcactgagagaggaagggacagcaggagtgaggtgaagagggcggagagagggggcaggctcggcaccggccctcccagcccggccagcctgagcttgctgccctccagtagagacagaggggcagtgtttgcawgggagrtgtttctgcctgtccctgcctgatgtccctggtggagcaggtacctccgggcgggcaagcctctgatttgcacacctgaaaatcgcggaattgagtttcgatagattgatttttaaaacttttttggagtagggggtataggggaatcatttaatttaaatcattaagattcccctgctcaaacccagattcctgtgtacagatgctatttagagggaatcagaaaaatgccaagccttttctctttgaatgtgctatttttataactgaacttgtacatatgtataaagagagacacatcttccttttactaactggataaaaaaatcttaaataaaatggagtgagataattttatgtaaattgaggtgtctgtggtctttgcagctgcccctccttggaggcaaactagagcccttggtggatgtggcaggatacagggaaagcagagccctcgcctgtgatcagagaggacaggggttggtgggacaaggagtggactgtgggtgtttccttagtagcagaattgattgggcttatgaatttgcctctggccatcagaaaggaagcttgaccaactgtctgacatgcagtggtcaacgcccttgtctccatggtgggctctttatgactcaggacttagaccccaggactgaggtgtgggcggcttggcctaggcgccattaagcagagctacatagtggtcatcttaatagtggcagtgttctcaaagttagctgcactcttaagaatcatgaaagaaaatggtgaaatacattcctaaggatgccagagacatccaggctgtgaaaacttaccttggtgatagttgggaaaagagccctagttcccagcctggcctggcagccagcgtttctctgactgggtgaaacactgataagctcttgtatcacttttgggtagggctcatgtggttcccaagtatgctggctgtgtggcctccctagccttgctcaccctgcacgctgttggtcagggtgggctggctcctgggcagctgatgcccaccacagtcacaaggatcagcctttcttcattgacatcaagtacattactagatactctggatcttgtttatcttgctggtgaacttgaccaaggcctcacacagaataaaccaacatcagaactaagcagctctgcctttacatgctatgtaaagatttttcataagaaaagatagtaatttgaaacctgaattgtcccttaaggcaacgcttctccagtgttaatgtgcacacaaatcaccttgagatcataacatgcaagttctgtttctgaaggtctaggttgaggcttgagactgagtttcttgagaagatcccaggtgatggccatgctgcttgctagtccttggactacccctggaataacaaggccctagggtgccttccagccctgccaagcaggaaaaatctctgctctttgcttatatgcccgcaccccagccaggaagcccggtgcaggaaatactttatttttcctcttacccagcttaatacacctgatgacagaaaatgaaatcctagcatttctagagaaattcaatcccttatatgttttctccatttttgttttgttttttcatttttaaactaactgttcatcattttctccatcacttcctgggtagcacctctgttgggcatgttaggtatgagagaaggcctcagatttgctactgtccctctcctgtgtggcctccaccaagatgcaatatgtcatgaagagtctgtgacccctggactcagtgtttcctgtgcctgtgtccttttattgtgaccaccagactcctggatcagtcatctttctcaactaattcctaagcccctctcagggggcatggagaccgtttggctgctctcccacgcttctctgagactaccagagagtcgcgaaacccccaactggggaggcagcgtgttgaccatgggtgcccagttcagccagcctcatggtgcacattcagaccacttagatggtggggtagggagaaggcaggttgtgttctagagaaagcagagacgtccggttgtcacgaaattgtgtgtccaagtactaaggcggcccactgcctcatcaaaggaccctgaggaagctgggtgcctcccttatctggcctcttcctgcgccctcatttctttcttgcttcaggtcctgggacttagctggcttccctttcctcttcaaaactgccaccacccactctctcgctccagtttctcccccaacccccacccccgtggcaagctgctgggggatggactcctggttctctcctagctgctgccagaagtgagcatcatgcttttcttttttttaaattaaggattttcttgctcatcacaacaaggacaccaggcaaaaacaatactgtatacagagaattacaaagcttgagatacttcacagtcctcacagaatccctgcctacagttcctggcacctttggtgagaaacaaggattcctgagggagaggctcctggactcttacctccttcctagagagctgagttctttcttccagaaaggcatatggaatgtgcatctgtgagtgcccacaaggcctctgctctcctgccacttgggatttcattgttctggcacacaaatctcaaaggtaaatatgtggcccaaggattggggaggcccctctgggtctgacttggcaacagcctcaggggaagaaggaagggggcacagaggttcaaagttggaggtggtggggagttttctaagtttgctcagctgatgcccccctaaagcagctctgggagagaatgcccggcctcagctcagaatgttccaccctcctaccacccccccagcacatcaccacaaaccccaccctgaactagaggcccaccccccaagctgttcctggctgccagagaagaaaggagctcccctcccatttcccagatgagaggtctcagaagacctatgctgctccatgccttgcacccttgaagagatggtgccagttacctggggatgtctgagcagagtggtggggagagttcaggtccaatggattgtcagtgcagttcagcttcagcagtcttagtttgccttcggcccggtggaattgggaagagcagcataaactcttacctagaatttttctgaatagctaagtctttcagagggctaacattttaacccggtattctaagcaccagaatttggcttggttagaactctcttttaaggatactgtgtcactgcatggctaaacagaacataccgaacataccttaacctttcctaagggcttggggtcatgtgggcatctggtgctctcaggcccactgggacgtactactgtttcccctggattaaatcatgccaacagctacactgccacaaattgtctgtgagacaggattttgctctgtcacccaggctggagtgcaatggtgcaataacagctcactgcagcctcgacctcccaggttcaagcaatcctccctgatcagcctctaccatagtgctggggttccagccacagttcttaagctctgaatagtaccagtgccagtgccagctgcctcagtgtttttgtatttatatgatgagatagctgctcctcttaaaaaataaaatctgggctgggcgcggtggctcacgcctgtaatcccagcactttgggatgccagggcgggtggatcacaaggtcaggagattgagaccatcctggctaacagggtaaaaccctgtccctactaaaaatacaaaaaattagctgggcgtggtggtgggcgcctgtagtcccagctactcaggaggctgaggcaggagaatggcatgaacccgggaggcagagcttgcagtgagctgagattgcgccactgcactccagcctgggcgacagagcaagactccgtctcaaaaaaaataaaaataaaatctttttttcccccactgatcttaacaccccttcttctaatgtaccttttctaaattgttgggggcttggaaatcatttaactaactcagaacttctgagctaacaaaaagaacttcagaggaggattgtaggatgtcctaggaattaagtaactgagcttcagtgcatgctttccacggatgcctgtggccctctgctgggccgcagtaccacagttctggttaagtaaagtaacatgttctagataagggtgttccggtttgaaccagttcaataaagtttgttgattttactcctttttttcattctttgaaaaaaaaaaaaaagtatagatcaccttgcacatctaggaaaagttctgccaaggggtctaggtagtagactggtgcatgctccctctcggactccatctgcaggcagagtaagtcagtatagtccatcaccggattttagtaggagcagtgaaaatgaaatgggcaagctcaaaagccagtgtctttgcacttcatctccactacccatgcctcatctttattggactaggctggtcatccctagggagtaatttggactaggctggtcatccctagggagtaattgcagtgtctgtccactggttgggccataagccctctgaccaattaatatcattgttcatattggttagggtaacacatgatgctgtaacagaccccaaaatgcttaaatatcttatttaatggcttaaataagatataaattcttatctctcacatgtaagagtttgaatttggatctgctctacacgatcattgaaggtcccacattctttccatcttgtttctctgctgttttgatgcttttgtcctcatcagcatggtcattactggtttatagaaatgtcctatggggccggacacagtggctcacacctgtaatcccagcactttgggaggctgaggcaggcggatcacttgaggtcaggagttcgagaccagccttgccaacatggtgaaaccccatctctactaaaaatacaaaaattagatgggcatggtggcgggcacctgtaatcccacctactcaggaggctgaggcaggagaatcagttgaatgcagaaagcggaagttgcagtgagccaagattgtgccactgtactccagcctgggcaacagagcaagactccatctcaaaaaaaaaaaaaaagaaaatgaaatgttctatgggaggggaagactggggaggggatccacctactgtattgccttaagacttagacccttaagtggctcacacactatcagagagaactttagacctaagaacctatctaactccaaaggaggctgccatgtaattagggaagaagagaacagatttgaatggacagctaatagtccggacacaacactccaatggaaagtgggctaaaacactatagatttattttttaaagcactttgtgccaagcactgtacataaatagaaaatatacacacatgcaaatgggtaatagccatgggaaatgttcagccatattagggctctacagagagacaaccaataggatatagatatatgagaggggacatactgggggaataggctcacatgattatagagactggaaagtcccacgataggtggtgtgcaagatggagaaccagggaagctggcagcatggttcatccaagtctgaaagccttagaaccagggaagccagtgctgtaactctcagtctgaacctgaagacctgaaagcctagggagcctctggtgcaagtcccagagtccaaatcccagagaacccggagccctgatgtccagcggcaggagaaggagggtgtccccactttagaaaagagggaatttgcctttcctctgcctttttgttctacgtgggccccatactataatccagtcaagttgacacctaaaattaaccatcacatcaacctcattaataaatgcaaaataaaacaaggagattcctagcatttcctgtcatactgggtgaaatttgttttcacataattgctaaagttggctaagctataataaatgaaacattgtagcttaatcttcaagagtcgtgtgtgtgtgtgtgtgtgtgtgtgtgtgtgccctctgcatatgtggcatgaagcatggctctagactgggggacaccctctgcgccttggaagaggtggtcctagggctgtccctttacctccagtgacacctgcccctagtgggcctcatccaacatccagacctcaaagttgacctcaaggagaatgatctggaccaccacaaccccagctttattgccaatgaacccctcaatgatcggcacggtgggggctgagggccaggagcaatgagcacctggctggctggaccacacctgcagagatcaatgagtgaggcccagcctggacaagtatctgcgagtaagttagaggtggctat

SEQ ID NO: 95832 - DNA, 17382 bp, Homo sapiens
tggtgatcacgccattgcactccagcctgggtgacattgcgaggccctgtctcacaaataaataaataaaataaaaataaaaatggaattcctacaagccatacacaaaaggcagatactgtgattccacttatataaggtacctgagtagtcaaattcatagatacagaaaataggatggtgggagctgggggctgggaggtagaaagaatggggaattactgtttaatgggtacacagtttcagtttgggaaaatgaaaaagttctggaggtggatggtagttatggttgcacaacaatgtgaacaccactgaatcatacacacaaaaatagttaaaatggtcaattttatgctacatatattttaacacacacacacacacacacacacacacacaaatctgtagggcatttccaggttggacaaccagcctgcacttttctccaaagatctccaaaatgcaacagttctatctccagtcaattaaattctgtttttttttctttctttctttcttttttttttttgagacagagtctcgctctgtcgcccaggctggagtgcagtggcgctaacttggctcactgcaacctccgcctcccgggttcacgccattctcctgcctcagcctcccaaatagctgggactacaggcactcgccaccacgcccggctaattttttgcattttttagtaaagacggggtttcaccgtttagccagggtggtctcgatctcctgatcttgtgatccgcccgcctcggcctcccaaagtgctgggattacaggcgtgagccaccgcgcccggcccctaaattctgttttcaacagaacacagactaaaggtctttccacagttccatatacatgaagatcctgcttggtaaaaagtgtctgtcagagagtactgttacaatgcaagggctgtgtgctcagcgcatgcagttcagccgtatgtctcatgctcttattttaatacaatcactgaaaggtaggtattttcaccattttacagatgaaaaaacaagttcagaagggtaacttgctctagggcacattactgatatgtggggaatccttgacaggaaaaccagatctgtgctgctccagaatccatgtttttatcaaataccatcctgcttgtttggaaaatataacgaaagcagcccaagcacgggcaggtaggaaaagctacgcaaagagcctggaggcttttataactatctaggcatatgagacaggctgacaccttctttcaagaggagacttagaaatcaggaaggctgcctgaggcaaggtctgaataatgccaggagacagagcccagccagcgtaaaggccggaagtaaaagggacagctatgacacggcggtcctgggtgaactgatgtctagcgctacagtgaacccccaacccgaattcgtctaaagccacccaaaaccaaaactttgctcacaccagagccccgcatggccccttaycccagggcagggcgtccagaaccacgcaggaaattccggcgtccagatcccaggcctcagtcgctcaggtctctagggctgtctggacgggatgaatcaggtcccaaggcctctatgtggtattccggggccgggccagagtgggagatccaaaacgctgggcaccccagcccctcctcacttaccgtaacagctgcccagtaaacgcttggctcagctctgtcgcctgtagcccggaggaaatcgggagrggcggagtcccctagtgacggagcmcaggagtcctccaactaccttcccacccgacgatgttctgtgcgtcgattggtcgagaggagctcagcgtggtgaagaagtgaggagcagcaagaggcgagcggtggacggggctctggttgccgggaaacggtggagtcacgtgccctgagcattgcccctcccctcccgagggccaggttgattccttgcagatccagggttccagtccctgcttggatagggaagtcgtttccaagacttttgacttttcctagtcgccggagccagttcacctcctccacaactttctctgtcggtgtttgtcttctaaaaatttcaccccttcgttacccaaattagagcacttccgcggcttctttccttactctcccaggagactcgtgtctcattcatcaaattatgaagctttccttcattcatttagtcaatagataccaagctcctgctgtgttctaagcattgtgttaagcgtgaagttaagacacatatgacttgatataagtcctggagatccttacagcttagtagtgtaggaagggggtccgccatggaggcataaaagtttacaaataacagtaaacagtgatagacagccgggcgcggtgactcacgcctgtaatcccagtactctaggaggccgaggcaggtggatcacctgaggtcaggagttcgagaccagcctgggtgaaacatggtgaaactctgtctctactaaaagtacaaaaattagatgagcgtggtggcacatgcctggaatcctagctattcgggaggctcaggcaggagaatcgcttgaacccggaaggcagaggttgcagtgagccaagatcgcaccactgcattccaacctgggcaacagagcaagactgtctcaaaaaaaaaaaaggagrggggggttgaggattatagagtatatgatggaagtgtggccagagtacataaaggagagagtggtcattagaagtgtgtgtcagaatgctttgttgttgtagttgttaaaggagatgacctttgatatccttcaggggatagataccagcttgttcattgagatcgacccctccccatccccagcttccaggatcaacaccacttactctctcccaagaaacacgtgatgaaagacatcagccaaccatcagtagccaagtaacttggctgaggaaatagttctcactccagcctgggtgacagagcaagactccgtctcaaaaaaaaaaaaaaaagaaagaaaaagaaaacaacaacaacaaaaacaacatagttttaggattacagatgtgagccactgcgcccagctaaaatacaatttaaaattcagttcctggccgggcttggtggctcatgcctgtaatcccagaattttgggaggctgagggggtgtggatcacctgagaccagcagttcgagaccagcctggccaacatggtgaaaccctgtttctactaaaaatacaaaaattaactgggcgtggaggcgcatgcctgtaatcccagctactcaggaggctgaggtaggagaactacttgaacccaggaggcggaggttgcgccaccacatccggcctgtaatcctaacactttgggaggccaaggtggatggattgtttgagcccagtttgagaccaccctaggcaatgtggcaaaacctcgtctctactaaaaatacaaaaaattagccagtcatggtggcacatgtctgtcgtctcagctactagggagcctgaggtgggaggatcacttcagtttgggaagtcaaggctgcagtgagccaaaatcgtgccactgcactccagcctgggtgatgggagtgagatcttgtctcaaaacttgttaaaattttaattaatttaaatttaattagccacatgtggctattgtacagcacatggctaatggtgatcctattgtatagcacaggattggagaatattacatagttcacagaacctcaaggtgagtggagagtcaggctttaggtctatacagccagggacagtatctgaatctcactgagagactgctcagggaacaccccacagccactgaacatctatagctggcattattcgtcgattgggtacttgacacaagaacctccccgactgttggcctcccagattagatgcctccaatgctaccttgttagacacggatttcacactgagcctgcttccgcggctgtgtgcctctgaaccaaagcctctgtctaagagatagagcccaggtcaaatgcctatgtccaagctgcaagagagtgtgggaaggctctggcttctacctcttgggggcagtaatgaaatgtgagaaattccccacccaaaagaagggtgttcggaagatgctggatgtttacagaatatgacaaatgtctactctacatggtctatgccagtgcttctcaagctttaatatgcagaaaaatcacctgaggatcatgttaaagtgcagattctcatttagtaggtcagaaggggaggaggaacaagattctgctatgttttctgtctccacagttttgccaggcactagtccaagtattttacttgaattaactaatttaattctcccaccccaatcctatggagcaaagaggctagctaagaatacatacttttcttttggataaggttctgctttcactgtaaatatcttaatgaaatgatgcacttgagagatgatgtccctcctgtgaagtagtttggttctaacataccccacaatcaatggagaattctacctcttatttctggaggtagtcaggaatcagacttttcagcatatggagttctgcagctgtggatacctcagctgcagtccctcagttagtttggtgagactaatgacttgaagaaggaatttagctaaaaaagatttccctttctcctctccagaatacaaatgcctaggataagaattagactgtctttttttttttttttttggcaaactaacattgaaatgcctccttatttggaagaatcccactctggataccaaagagggttagattcttggccgggcgcggtggcttacgcctgtaatcccagcactcataatataaaaattagccaggcgtggtggtgcgtgcctgtagtcccagccactcaggaggctgaggcagaagaatggcttgaactcaggaggcggaggttgcagtgaggtgaaatcgctccactgcactccagcctgggcgacagagcaagactccgtctcaaaaaaaaaaaaaaaaaaaaaaaaaaagagggttaaattcttccatctccaggcaccctggaagtgagggctcagagcaatgaggtttggctgatggaagtcctcccctgcaggactcttaaccttggaagagggacacagagacacagggagatttaggggtctccaaggggtggcagggctgcaggaaaaagagtcctttggcacaacatagtttcttgtgtctactgcatcccaactgggtttcttccctgacatgtctgaagccaggctctcaaaaggcttggtttcccttgatttggccctttttctgagcctagtctccagttgtcttgtgaattctatgaggcactaatatwctttccataattctatctctgatgaaattagccagagttggtttattttgcacttaagaaccctcgccatatatcctctgatctatttgcagttttaatctcaggatggaagcatgtgggaggcgaatggggatcactaatccttctcatgctgttagggggaaacacaggtgtgaacacattgcttctggggtgcttgtgtgtgttttaaatacatatataacaatcttactgagatacgagtcacatactataatattgacccttttaaaatatagaatacagtgggttttagtatattcgcagagtttagcaatctttattctggttgttagtttttgttttgtcttaaataaagctcctttcaagcgtttcttcagacccaagggactactcggaatttacacgacctactcctgtcatggcctttacacggagcaattccaagggtttcctttataaataacgtcgtatctccctaataggaagacgtctgagtaaggtcacttttggtgagacatttacagtctctcatctctaagctcactcaattcacctaatttaattcgagcagctcactcattcgctcacttatcgcagaccccgcctcgggactgggcctccctgattcgctggggccgagtgacgtcctcagatcgcgaccctgrgagtggagtgggggcagcgtggttatgtggctggaccgccgcggatggctcagggttcttggacattggcgctacgaccttaggcgccctagctttaccaggacttggagtggcgataagggcccaatggcagaaacagtgtctacccaggttgggacagagggcgggctgagggcttcgcatcagcaaaacggtgacgctggtggcgacgcgaaggttgagctgtcccccgggcccccgaagccggctggccgggaagtggagccggccccagtaggcggggagcatccctcggctgcagccccaggcccgggcaagcataagaagcggcggggcgcaaccagggagcgtgtcgtgccgcccccgaagaagcggcggaccggggtgagcttcggagatgagcacttygcagaaaccagttattacttcgagggcggcctgcgtaaggtgcgsccctattactttgacttccggacctactgcaaaggtcgctgggtgggccacagcttgctgcacgtcttcagtaccgagttccgagctcagcccctggcytactatgaggccgcsgtccgggcgggccgcctgcaactcaacgagaagccggtgcaggacctcaacatcgtgctcaaggtggagtcctgatggggctggccagaagcgggcgaggaaaaggggccgggttttgttttgtttkgttttgttttktagtcttagtaaagcataggtactggattaaaatcatggcaattctaaagcgttctcgctttcatttggaacactattttagcccgtttcccacctccgcaagtggccagggtgtctgtgcttcaggactcagcctgtttatcctcttcctcaaggcagcttccttgtttccaagggacagaagttggaattttcataattcctttaaacaccgtcttgtggcaagggcactgatcactttaccctgcgttgyagatctctgtgcaaatagtaataataggggctatcatttatgtctctttactgtgtgctgggcacaaagttaaacattgtatgtccactaattctaatgacagccttgtgaagtaggtattgccactccattttacctctgaggaaactaaggaaactcacaggggtaaggctatcaacagtgccactaccaaagcctatgttcctataactactacttaaactatttaacatagagttatgagatgtcagggatagagactagaattgtttagcccagtgctttgactcctttaaaattccatcacatctatgaggtaccagacacccctgtcagaagtaacactgtttacctctcagtaacactagtttaccatggttgtgagtggagaaaaggcgattacagcatttggggaatggatggttttggagtaacttgttccattgatcaatcgatttgygtcaatatatcatacattgacgaattccctctcctatcccaatttctaaagcacagatctggtctaaccctcacattccacaggaagcagagacccagaaaagataaatgacttgcccaagagcatgtagcgagcctgtggcaaatcctggtctagagcccatatccctggacttaagccttagttttgtttgttcaagatcgtaataagtgatgatttatggaggttttttcctccattaaaaaaattttaccttgattatttattttttttttttttgagacagagtcttgctctgttgcccaggctggcgtgtagtggcgcgatctcggctcactgcaacctccgcctcccaggttcaagcgattctcctgcctcagtctcccaagtagctgggattacaggcatgtgccaccacgcctgctaatttttgtatttttagtagagacagagtttgaccgtgttagccaggatggtcttgatctcgtgatccacccacctcagcctcccaaagtgctgggattagaggcgtgagccactgcgcccggctaaaaaattttacctttgaaatacctttattgtagagaaaatacaattagcaaaaccaaaaaacattcataatctaaccacccagagataacacagttaacatttttgcatatgtccttccagtactttttcagtgccagctatctgcctgtgtctgtctgtatttttacaaaatgagatcacactctgcacactgctttttcagcccaagatgtgctttcaccatttttccatgtcagtgaggaacaggggaagctggatatgaagttgactgattacaggctgcggtccctaggctgacttattacctatgtctttgacaggacartgatttcttgcggaacacagtgcacaggcatgagccaccagtcacagcagagcccattcgcctgctagctgagaacgaagatgtggtggttgtagacaagccttcstccattcccgttyacccctgtggccgcttccgacacaacacagttatcttcatcctaggcaaggagcaccaactcaaggagctacaccccttgcatcggcttgaccgccttacctcaggggtgcttatgtttkccaagacagctgcagtctctgagagaattcacgagcaggttcgggaccggcaggtgagtcaggcttttgtctcctacaggccacttctygggctcacgaatgctctgtgtcaaaagggcatcatggagttccgaagtggtccttcatatttatctggccatccttcctaccttcctaccttaaggcaggtcaacacctaaagtgccaaatgcaggatatctcatatgtttccaaaaaaatctttagagatggcatacactgcctctcttagtagtttgctattttgaagctttaaaatgctgacaaggccaggctcacacctgtaatcccagcattttgggaggctgaggtgggaggatagcttgagcccaggaggtagagaccagcctgggcaaaatagggagaccctatctctacaaaaaaaaaaaaaaaaggccaggcgcagtggctcacgcctgtaatcccaacactttgggaggccgaggcgggcagatcacgaggtcaggagatcgaggtcatcctggctaacacggtgaaaccccgtctctactaaaaaaaaatacaaaaaattagctgggcgtggtggcgggcacctatagtcccagctactcgggaggctgaggcaggagaatggtgtgaacccaagaggtggagcttgcagtgagccgaatcgcgccaccgcactccagcctgggtgacagagtgagactctgtctcaaaaaaaaaaaaaaaaacttaccctggcatggtggcacatgcctgtagtcccagctacttgggaggctgagataggaggatcacttggccatgggaggttgaggctgcagtgagccatgagcatgtcactgcgttccagcctgagctatagaacaagactccgtctcaaagaaataaattaacataagaaaataaagtgctgacaggctgagcaaggcttttaagattatggggagagcctgcttggtgaaaagattctagatgtagttggaaaagtcttgggtagaggagtttaatggtaatgattgttgtcctgagacttgtaattctggatctgaatcataatacatttattgagtgcatgctatataccaggcttagtatcaagcacattagagcctaacttactgaatgcttatcacagcccaatgaggtaaatgcttttcttttcttttctttttttttttttttttttttgagatggagtttcgctcttgttgcccagtctggagtgcaatggtgtgatcctggctcactgcaacctccgcctcctgggttcaagcaattatcctgcctcagcctcccaggtagctgggatgactggcatgcgccaccacgcctggctaattttgtattttttagtagagacggggtttcttcatgttggtcaggctggtctcgaactttcgacctcaggtgatccacccacctcagcttcccaaagtgctgggattacaggcgtgagccacctcacccagctggtaaatgcttttctaatttcacattttctagatgagttagtaggatttagaggttaagtaatgtacccaagatcgcaaaactggcgaatggtagagctggagtttgaattttctgacactggtccttatcactccacaaagagtttggactccatgaatttaggctttgtactgactttctccctcttccctcctatgtagctggagaaggagtacgtgtgccgggtggaaggggagttccccactgaggaagtgacctgtaaagaacccatcttagtggtgtcttacaaagtaggggtgtgccgtgtagatccccggggcaagccctgtgagacagtgttccagaggctaagctacaatggccagtccagtgtggtacggtgccggccactcacaggccgcacacaccagattcgagtccaccttcagttcttgggccatcccattctcaacgaccccatctacaactcagttgcctggggtccttctcgaggccggggcggctacattcccaagacaaacgaggagttgctacgggacctggtagcagagcaccaggccaaacagagcctggatgtgctagatctctgtgagggtgacctgtccccaggactcacagactctacggccccctcctcagagttgggcaaggacgacctggaagagttggctgcagctgcccagaagatggaggaagtagctgaggcagcccctcaggagttggacacaatagccttggcatcagagaaggcagttgaaacagatgtcatgaatcaagagacagacccactctgtgcagagtgccggctggtgcgacaggatcccttgccccaagaccttgtgatgttcctacatgccctacgctataaagggccaggctttgagtacttttcaccaatgcctgcctgggcacaggatgactggcaaaaggactgagggtgtggccaatggagggattgcttcttgggttgtgacaaggatgggctatagggcaagggctgaccccatgggctagtacttggggtttctataggaatgaggacgggcttctaaagagacctgctcatacttgctacctccttccagtgggaatttggagactttttggtttgtaaatatatccctttttctaacatctttgatgtctggttttcttccggcttcttttttattactgatgtaaaattcacataacataaaattaaccactttaactagccaggcacagtggctcatggctataatcctagtactttgggaggtagaagtgaaaggatcactggaggycaagagttcaaggttaaagtgaactgtgattgtgctgctgcactccagagcctaggtgacagagtgagaccctgtctcttaaaaaaaaaaaaaattaaccaatttaagatgtacagcgtagtcacatttagtacattcacagtgttgtacaaccataacctcatatatttccaaaacattttcatcaccccaaaaggaaacctgtacccattaagtaagtggtcactttccactccccttccaccagcctctggcaaccactaatctactttctgtctgtttggatttgcctgtttattctggacattttatataaatggaatgataaaacatgtgacctatgtctctgtttcccttggcataatgttttcaaggtttattcaacttgtagcatgtatcggtacttcattctttttttatggcagaataagctgttgtatggatataccacgatttgtctatctgttcatcagttaatggacatttgggttgtttccaccatttcattattgtggatagtgctgctgtgaacattaaatatgttttcagttcttttgggtatatacctcacagtggaattgctgggtcatatggtaattctatgtttaaatgtttgagaatccaccaaacttttccacagcagctgaaccattttatattgccaccagcaagcatagggtttcaatttctctacatcttcaccaacatttgttttgttttgattatagtcatcctagtaggagtgaagtggcatctcattctgggttgttagtctttttgttgtggagtgtaagtgttctttatatattctggatgtgagagtcttagcaaaaagactaacagcccaacttaaaaatgggcaaaggattggaatagacatttttccaaagaagatatacaaatgaccagctaacatatgaaaaaaaaaaagctgaacattattagttatcagggaatgcaaatcaaaactgtggcattagtataagaatagacatagagtgatggaataaaatcaagagtcaagaaataaacccatccatctaaggtcaattggtttttgacaaaagtgctaagactgttcagtggggagagaatagtcttaaacaaatgtgttttttcttaaacagttcgtgctgggaaaactgggtattcacataaaaaagaaaaaagttagacccctacctcatacacaaaaattaactgaaaataggccaaggacaatggcttacacctacaatcccaacactttgggaggccgaggcaggaggatcccttgaggccagaagtttgagaacaccctgggcaacatagcaagaccttatctctacaataaataaataaatcagctgcgtgcgatgatgtacgcctgtagccctaggtactcggaaggctgaggcaaaaggattagttgagcccaggaaaagtcttagaagaaaatattggggtaaatcttcaagaccttaaatttggcaatgggttcttagatacaacaccaaaataataatcaatgaaatacaaaataaataaattgcactttatcaaaataaggacttttgcgaatcaaaagacactatcaaaaaagtgaaaagacagcctacaggatgggaggaaattccagaagaggaatagttgggtatatggtaatactaatttataattttggaagagcctccatactgtttttcatagtggttgcagcattttacaatcctacaaacagtgcacaagggtccgatttcttcacatcctcactaacacgtgtcatttttttcattttttgatagtgtccatcctaatggatgtgagattatatctcattgtggttttaatgtacatttctctgatgattactgagaacatcttttcatatgcttgttggcaatttttatatcatctttggagaaatgtctatccaagttctttgctcattttttgatttacaattgtctttcagtatccatgcatgattggttctaggatacctccaccttcatcccaagataccaaaattcacagatgcttaagtctcatataaaatgacatattatttgcatataaacgtcctctcgtacactttaaatcatctctagtttacttactatacatagtaaatgctatataaatagctgttatactgtgctgtttagggaataataaggaaaaaaagtctgtacatgttcagtacagatgcaaccatccatttttttttccaaatgttttcaatctaggatttgttgagtccacagattcagaatctatggacatggagggccaaccatatttgatttttttgttgttgagctgcaggagccctttatgtattctaggtattaactcattatcagatacatgcttagcacatattttctcttattccataggttgccttttcactttcttgattgtgttctttgatgcacagaagttttaaagtttaatacagtcccatttgtctgttttttgtttttatttattttattttattttattttattttattttattttattttattttattttatttttttgagacagaatctcattctgtcgcccaggctggagtgcggtggcacaatctcggctcactgcaacctccacctcccgggctcaagcatttctccttcctcagcctcccgagtagctgggactacaggcacacgccaccacgcctggctaatttttgtatttttaatagagatggggtttcaccacgttggccaggctggtcttgatctccggacctcaagtgatccacccaccttggccgcccaaagtgctgggattataggcgtgagccaccatgcccggccagaattgttttcttaatttcatgtttaattatttattcattggtagtctatagaaatatgaccgatttttggctgggggcggtggctcatgcctgtaatcccagtactctgggaggccagtcgggggatggatcacctgaggtcaggagtttgagaccagcctggccaacatggcgaaacttcacctttactaaaactacaaaaattagccgggtgtggtggcatgcgcctgtagtcccagctacttgggaggctgaggcaggagtaacacttgaacccaggaggcagaggttgcagtgagccaagatggtgccactgcactccagcctgggtgacagagtgagacaccgtctcaaaaaaaaaaaaaaatatgactgacttacgtatgttgattttgtactctgcaattctgctgaatttattagctttttttgtggattctttagggatatatattatctaatacacaaattatactatatattatatttatatatatatatataatccatgtcatctgcaaatagagataatgttacttcttccttccccatttggataccttttgtttctttttcttgtctaattgctatggatagaacttccagtacaatgttgaatagaaatagcatagggaaagtgggtctccttgtcttgctccttatcttaggcggatagttttcagtctttcaccattgtgtgtgatgttacctctgggcttttcataaatgccctttaccatactgaggatgttcttgccctgcatttttttttctttttcttttcttttttttttttttttttgaggtggagtctcgctctttcacccaggccagagtgcagtggcgtgatcttggctcactgcaagctctgcctcctgggttcatgccattctcctgcctcagcctcccgagtagctgggactacaggtgcctgctactgcgcccagctaattttttgtatttttagtagagacagggtttcaccgtgttagccaggatggtctcgatctcctgacctcgtgatctgcctgccttggcctcccaaagtgctgggattacaggcgtgagccactgcgcccggccttttttctctttttgagacagagtctcgctctgtcgcaaagcctggagtgcagtggcactgtgtcggctcactacaacctccgtctcctggattcaagcaattcttctgcctcagcctcctgagtagctgggattacaggcgcccaccaccacatccagctaatttttgtgttttttagtagagactgggtttcccaatgttggccaggctggtcttgaactcctgacctcagctgatccacccaccttggcctcccaaattgctgggattacaggcctgagccaccgcgcctggcccttgccctgcatttctgcttgtttcttgccctgcatttctgcctggacagccctttgacttctgctcaggcagaaaccttttctttcctgttccttctgttgtacacctgtcatgtatttcctatttcgttggagtactcataaagagaaccatggatttttgttttcaggtaacttcatggtgaataacaaaggcttattcataccgaatccattgcctttgaccagaacatatggagcagaagtagtgtaggcggggaaagcaattgtgtttatattcttttagtggttcatattggtcgttaaccacctactatatgccaaacattatttattgctgggatacagagatgaatggctggcccctgccctgttagaacacacatgatgaaatgtgcaagtacaaagggaaccagtggaaatatgatataattctgtctggaagtactagcatagatttcccagagaaagaggcatttaacagtgagttagaatttgcctactagagatataagaggattccagatagagggacaatttgagagaaggtggtcatattctagaactcgaaaagacagaggaggagacacccaaggagagcgtttaaccctggggctctagtatatgtctccctatcacttactattgaagcctttttttttttaaatttgagacggagtcttgctctgttaccaggctggagtgcagtggcgcaatctcagctcaccgcaacctccgcctcccgagttcaagcaattctcctgcctcagtctcccgagtagctgggactacaggtgcacaccacgcccagctaatttttgtatttttagtagagacagggtttcaccatgttggtcaggctggtctcaaactcccgacctcaggtgatccgcccacctcggcctcccaaagtgttgggattacaggcgccggccaccgcacctggcctattgaagcctttcagtggcttgtatatcacaccagtgataggggattctcatgaatctgagtatttgctcagcttcaagaaaaccctatctccattccatgagccagccaactctccttatcactgagaccctccataactcaggagctgtggggtcctaggactgggaagaatgagatatccaataaaatgaattcatatggcagatatttgagagccaactatgtgctggattcacactaggctctgggtatataatggtgagtaagacagataaggtctccactcttatgaagtatacagtccgaatgtccagcacaatgtgggaaagtaaacagtaaacaatgtggtaaatgttctgtgtgacaggagaaggagggaggcacacctagtgtgattccttccaggatcccagggttctgaatgggagcattagcatttgcccattttccatctcacctcttaagttctgaattttaccctctctagtgctgtttatcctattctcattatttcagaggttcttgagctagagacacatggatgggcttgagaggatccctggatctcttgaaattttatgtaaaatttggtatatgtgtatacttttctgaggagagtctatatattaatttctcaacagatcttttaaagctgcgttgtccaatgctagcaacatatggctatttaattaaaattaaataaaatttaaaatgcatgggaagccgaggcgggtggatcacttgagtctcggagttcgagaccagcctggccaatatggtaaaaccctgtctctatgaaaaatacaaaaattagccagccatggttgcatgtgcctgtaatcccagctactcaggaggctgaggcaggagaatcacttgaagccaggaggtggaggttgcagtgagctgagatcgtgccactgcactccagtctgg

SEQ ID NO: 95833 - DNA, 91623 bp, Homo sapiens
ggcttgagaaaacctcatccagtatttccacacaacagtcatacccagggccacacaacatgggctttccatgctctacccattctattggcagcagtgtggctggatttagagtattcacaatctccaaggttatgtaggggttttcacacaaaagcccttgatatcttaacatcctagggttagaaagccagcgatgcccactctgctccatcagggtgatgaccgtgtggggaacccgaattatcaacctttgtcccaatttgagcttgttagcatcttctgctaacaggacagtggctgccaatgccttgaaacacagtggccatcccatagccaccaagtctagccctttggactaatatgccatgggccaataccatgaccctagtatttgtaccaagactcctgtagctattccttaactttcatgaacatataggtaaaaaggctttttcatgtctggcagtcctaatgctggggcctggatcaaagccttcttgatttctttgaaggccatgtcctgctgttttccccataggaggggttccttttccccctttttgtggcttcatataatggcttagccatgagcaagaaatttagggtccaaatgcgaagaaccctgctgcctctaggaactttcttatctggcaccgggtggttggagtaggaaacgcacaaacagcctgctttcattcaccaccgagccatcttttcccttggcttatacagaagcctaaatactggacacttttaaagcagatttgagccttttttacctgacactttatatcctgccttccacagcaggtgcagaaggttttgggtttttcccgggtgcagtagcccttggccagtggctttcttataccatggtcctgaccattttccttattctcttgacattcatcctttcagtgtcctttccttttgcaccattcacattaatctttttctagccttggccagctcttaaatccctgtccagactggcctctttcacgactgcacccacgcctccttgcaaagtcagcttcccttcccgtgagggctgctgctagtaaatctgcctttccttaagcttccaattagcttccttctttgcctcctgatctcggttaatgtacacctttgtagccactttagtaagctgagtatcactcacgcctgtggagcttctaacttctgcaatttatgcctgatatttccctgggcctgccttacaaatgccatatttaccatgtactgtttttcagcagcctcagggtcaaatggcatatgaagccgataagcctcgcagagcctctcgtaaaattcaccgggactttcatctggcttctggtggacctctgagacctttctgatattggtggcctttttccctccagcctttattccatttaggagtgcctctcaataccactgcaaactttgtggcccttgagcctggttagggtcccagcctgggacagcctctatcagaagtgcttgttgtgcatactgcctgatatctcctgtgcctgcaggctcattgttctcgagccactggagagcagcttgtataactctttggtgctcttccatatcaaataatgacagaagaagttgtttgcaatcaacccaggtaggattgtgcattaggaaaatgggctgcattaaatctataagagcctgaggcttttctgtataggagggagtatgttgtctcctatttcagagatcagtagtagagaagggctgataaatgaagagccattctcccccttggacttcattctgtgcattcaaataaatttgtccccatgtttatcggagggacatctgcattgcttgggcatgacctgacctaagatagccaacctcatccccctggaattcctcccttgggttttcaggtaagggctctgacttctgtctgcgtggtgttgcctgagggatgctttcttctgagtctgagcctccagaggcagccagggcagcctcctgtctaagccttgccaaggatggataaattggtgcatagggggtagagtttctaactcttcagatggggcctgtaggacaggttttttctgcttttcctgtgactctttttctttttctgatgacttgcagtctctttctattgttcctggttttgtccaggccattaragtcttatggtaggtctcaaagcaggtctgcagccacttagggcgggtctgaattacacttagctgggagtctgtatacgggaactgatctgggtgcctgggctattctccaagcccagtgaccacctgaaacacttggccaattatctccttgtgtattgtcccctcggccagccaccctacattaaaagacagccggtttatctcacaaaaggttctcagtttctgtggagttagcttaaccatttaatcaccatttaaaccttttgtaaaagtttttcagcatgcactccagtggagtaggctttgatgcttttcctcccatttcttccctcacggcatgctttcactgtcactttcactcttggatccaccagaccaggtcctattatgggaggttcggatgctgcttagccaggagagtgccttcattcctgttacagctagctgcagccatggtggatgctgcttagccaggagagtaccttaattcctgttacagctagctgcagccatacagctggtcctatgggctgtatgcagtgttctaggtctggtttttcccacactcgcctcagagcacacagtgcatgctaagagatctgtgcctccccatgtcacaccccgcattggtctctcctgagactgtctcacacacctcccccgtccctgaaactgttttcctttctgactgacttgcgagccccacctgcatctggtgtcggttagggcgtgagttttgtctgaatcaatgggcctctcccattgtcccaaccccctcgggtcagatcagtcatcatgccctgggaggtgatcaggctccccttccgtccttatgggacgggtcttgccttagggcccaaactttaccgtggttcagatggctgtgcgctgctcccgtgaccatcctgcaaccccttccactggttccatttgtgctgtcgggggaaggccccagaacgcgggagggcagttctccttctgggctgaaactctcctggtggtgccaaggaccccagatctcccatgtcctggggctgtagcccacaggcaaaggagacagaaaatgttccctctccaatcccggatgagcccccagaaatgttacaagacaatcaaagactggagagactgaaaaaggttcaggagagtctattaaggtgatcaccggcccagccggacatatgtccagaaagtatgagccccaaactaagggcttttcctacttttaaacatcttaaggcaggaactacatgaggtgggaagcaagttacagaagcgagaaacaaaggcagttaatcaagcattacaacatttcttacatcttgagaaaaacatgtcttgcaacctaaacttattggtcttgtgactctgcagctgtgcaggagcttgctggcctgtaataaacttgaggaatttggagttggggagtatagataaggtccactgtccacagagacaggacaggctgttaacattctcctttaacttgagtgtaagggggcagggatcacactttgcagaaactttaagaggattttaaaatttctattactactactattaagttacgtttgatttcattaatttcttcttcaaattctagggagtctgatcccagagttaatggtgaatgattacaaaacttatataacatctcacatatggttgtttatattttccaataaagttatatggggtgaataattataacaagtatttctgaaaaaaataacaattgagaatactgatatatatagtccacagaaataatgagggaattttaataccatactccacattggctgaaactttctcactgcaggctatgctgtcccattcaacattctataaactaaagatgatagggagaatcttgtttaatctgaatgggagcttgaaggatacattaaatatggaaaatatgcatccttccttaaagagaagtagcaaatgttttcattattcatttattcaaccacttagccaataatgttaacaattaaaggtgggagcattaaaaaaaggaaaagtggggtggggcggtgaaatgaacctcactgatttcttgcttttatcatttcaaactccaaaagtgtatttcaactattcatatgatgattgaataaacttgttttacattatggaacacccttactgtgtagagctgtgagaaattcaataatcagtatttaatgtggacaaaaatagatagattagagaaacaataaacatggacatatctacacataatatatactccttttctatccaaaaatctgacaaaaaccttacacaatggtcagtttacaccattttaaggacaaggatgtggtgaaacaattttaaacatttttatataataaaagaaaaaagttgttttaattgctaatgatcaagtttttaccaagaatttacatatgcatcatcaaacagtagcttgaaactgaagcttgacctttgagaaataaagcttttaaagtaaatgtctaaattctcttttctttattatgttacatttcatttactttaggttttctagtgcaatttaaataagaaataaatagagagtatggtaatcaggtacaaaggctgtgaaaatattccctgcattttgcacagggaatatgttcaaattcctaatctgcaaagaagaaaagtgcattttcttttttgaaatggcatttgaagatctctccatccatgaacattcttgagcatatggattttacaataacagcagtgtatattagttttttaatttatcattaactgataacatatacagtaaaatataatttccgttttcttatctaagggcagaaaatcccaacctatttctgaatctcactttggaacaaggacagaatgacctgacatggcatttttgatttccaacgtttaaacgcataacgtttgtgtgctatggaagcatcttagcttctggaatttatgctcgacacgaaacataaacaataaacaattcagtccacgttatatagacatatctcatatatatatgagatatatatatataaaatatcttacgcacatgcacacttagactttctcggttttcatgaaactcacaatctacctcaggcgctcaaaggcactcggcctctcaggtctgaggcaccacagagaggcttccttgggcacagttgcttgctggtcaagacgccaacttggcaaggttatgctgctggcaaaggcagattcgtcagaataaagtcgccacaggctcaaccaggcaaatcatgaatggccctttcagcaggagcctgagaggagggatgttattcagcccagcaaccctatttactttttttcaggatccccaaactcgcgttttttaaggctttccgctacaagagagccaaaattgaagcctgggttggcggcagtgcaggtacctgctcacctaagcatccctcttttaattttcctaactcctccacacacttgcccaagtataacttttgaatggattcagcagaagtgaggcaggaaaggcaggaagatgagaaaaggcgcgacatcaacacgcagagctcactgagccgccttgatgataaaaggcgggcacagggactacgtgggtggtggcagaaagggcgcgggacacgcctcgcaaagagggaagagtgggcggggccacgtgccggtgtcagagttcgcaactcgagcgcccagagggctcgcgaaaagtcccagcctgcaagccaaccgcgctcagcggacgactggccggatcccaacgcgctgccccttgcccagcctgcgagcgcgtggtacgaaggcgcgtctgcatccatgccccagcccggggagctggaggcgctcgcagtcagaggcgagtgatgctaggctgagcgcgtggcggcccgtgtcgtgccccgctgagccaagtgcggaagggcagcggcgcgctccagctctgctcgccgcgcgcagggcgggggggcctggccgcccgctgggagctgcggacgagcaggcgcgctgaggacccgagggaggacacggttaaagcattgctatcaactgtgaacccagagagccctccttagccaacacgctaactccgaagcctcccttacgcccccgaaccaccgaaggcggcgacacctgattcagcgcacaaacacaggtcccttctgtcccggatacaattacgcggcagacacacactcagactcgcgcggggcagccaagagacgaggtgagcggagggaccacgccgttccagagggcggaaggrggggcggtctgggtggaggagaggggcgttgtttgctccctgaggtgagtgccgggcgaatggctgctgtccaggggcgggggggtgggaattagaaagcacagacagggttgggctgaggaagttagaagtggttagtgggggttggcggggtagggagaaaggctaggggttgagggggtgtgaaggagatctttttaggctggcccctcatagcgcccgcgatcctgtttctsccatatggcatccgttcgagggttctctcgcgtttgtgcgctcaaggcagagggagggtataacggggaggcgattcggccgaggaccttgtacttgacccctgaagggatgggcaccgcggagcccagaggccagagccagctgccagggcagggatggaggtgggggaccaggaggagcttcgggacctcttcaactcccctttactccgtcttccccctaaggaggaacaagagcgggatgtgttgggggtggggaatgtcttggggctgtacaagctcgmtgagacttttcggggcccgccgtttccgcgtgcccgcgcgactctcgacaatggacagtgtacagtggtggcagggtttcacgggtccccgcgccgatttgggaatggtacggggtgcccttgcattagagaagcctgtgcgggcccccgggattagagaagaggtgagcgcctgcgggcggggagagaaggacgcgctgctggcaaaaagaagggcgccttccatggactggaggagcggcgagggagcctggtatgtgtgttttggatttgaaggaggcaaaccgcatcggagagtgcaagtagatgcagtgcgtcggggcaaaaggacaatctgaggaggtgggcggggtacccaatctctatatacaagctttctggtttaattgagggtttataaaattgagtacggtaaacctgccattgtgcagcacttccttaggaaaggaatagcctctgtacctgtaccgcgagttcccatcacctttcagcatctaggcggggagaggagagaaggtagagaacttctgagagagttctgagaactaacgcgaatggctggattgcgctaactaggcgttcttagcaggaaaatgtcgccaagggaaggagtgggtggcggtatcaaaccaggcgtgctctggagaatcacctttattatgagccagtgttagcagtgacgatagagtcttttatttctggggatcctattggtaaaaattagaaaaaaaccacactactccaaatactccaaaaatcttcagtcccctcaggctgtcaccttgtactaccagtttttcagtatcaatgacgtgaatgttagggagtttggctagatgccaaattgttatcatttctgataatttcatgttcaaaaacgtctatattcactcaaaattggcgtgcttctgacatatccccagaaaaaaatcaccaccatttgaaggaaggatagaaagtgcccttttttcttttcttttttaaaaacttttattttaggttttggggtacatgtgaagggttgttacataggtaaacacatgtcacaggggtttgttttacatattatttcatcactcagttattaagcccagtacccaatggttatctttaascaatattttaatagtgttaagagtaaccatactttgtccccaggagattttaaaattagagtcatgcatcttaatattatatggtaaaggagaccagaactttgtgttacttgaattaaatcttagccagcttagttttctcctatagaaactgtctcttggtggtttgaggttttgctttaggaatgtgtctgtgttcagcaactcttctagataatgccagagaaaaacactctagtattgtatgatttgcctgccacctacaaggttaagttgacatctagtgttgtgtgacttagtattatacaagtctttaaaaactacaataaagcatagtgccccgatatttagtaaaggcttgatactctattaggaggttgggcataactgaacagaaactatacttctgactttttccaggtaatactactatacaggttcaaactctttttaaatctaagatttccagaggactatgcttgttgtatttaagcttggtacrcgtcttagaataaataaaccaatgcagtaaataaagatgcttatgacaatttttttggataaaaactacttttcgtttaaagattttgacagtttacatttcccaataatttaaattaaaacattttattgcaccttatgaacaactatcagcttcattaccatttaaatattgctaaaaatcccatcttcaatcctcaaatcctttttaaaatcatgcacctgtttatcaaataatatcaatttgttgctttttaattcatactaggattttccaacatacacctgggaatttctaagatatccttggagagtgagaactttgattatttatgcaagatatagtatctcatttatttgacctcatctgcattggtacttatttacataagcacattttctcggtagctgactcttcacaccgtttattactgaaacttaaaaaaaagagccattataacccacaagcaatttctaaatcttactgtcttccttgttcccttggagaatattggatataagttattctttcttgttgggttgtctttatgaattcataaagaattgaatagtgctattcgctgaggtgtatagagctgtttttgtttatagtaaatggtctcagcctgctgggttgaaatactagaatagagacagaagtaccattcttctttttatgtttkttttttttttctgggtcctctttctgttattggctatcactttctgctgctgtcagactgtgagtgggccctgctgctctattatctgttgtctttttttccatcaaatgatgtgggctattgcccgagtgtaaatcctgtagactttgtgacagacactttcagtttacgtgctttatttgtggtttggactgtgaactgaaatgtttaggtttccagaagggtgacctctatataaaaggttttaatgtaccttttatagaaaaaatttgtgtatgagatctttaggagggtgtattaatttcagacaattcagtcttctggaatatcttggtgtttctgagaaactgaagcagcctttaaaaaaaagtttactttcttatgataggcccagatcgtctttgtttaggaatatgtatactagaatattttacatattactttctgccattgaaacttactaactataatgtagtgtagttaatatttttctaccccagaagtccagaataagaagtatgatttgagaatcctgctaaccatacttgaggctacatgaattatttaaatattattttgcaaatctacttatggaggaggtacataatcaaatacatatgattaaaatggtttaatttgatcttgaaaacagtggtaatcatatctccttaatctgaagcatttcacaaacattcattcttttattcaacaaatatttgttaaaagcatactgtgtgccaagcactgtgctctggggatgtgcatacaattaaggccctgggagggctctaggtttaaaagggggagacaaggaggaaacaggctattttcaatatctacagtatagtgctggctgttctgtaagtgccgtgatagagatacacacacagtaccctgagcagaaatttggaagtggtcaattctgtgtggggacaggagatttgagggtttcttagagggtgacataaaagatgaatcactggaggcaggagcaagatcatggagggctgtttgccattctcaggagtatggactattttcagtttaaggttgttttaaacagaggagctatgtgatgagaaaacagctcttacagcaagcaatctagaaggatggatctgaggaatgtgagatttggatggtagtttagaagatattggggtggctttggtaagagaggttgaggtccttgtaccaaagtgttggcagtgggatgaaaaaaaggggtttggttacaacgatattcaggtggtagaacctctaagattaggtgaccaatttggttggaggattgggagtgggtggtataggaggatgggatgggaacttaaaaggagatccagatttgagagcaagagtgatagagttcagttttagacatgtagaacttgaagtgcttatagaaaatcgaactggagatgtgtgtccagtgaatcattgtatgtgagttctgagcacagaggtcctgggctagataggcaggtagataaatggtaggtagataaatggatagacacacagaaacatttaggagttttcagtgtataggtaattataaaccgtgaaagttgataggttttccagggcaagtaccaaaagttaatagggaaacagaggcctggggagatcctaaaatttaagagttgggtagagaaataggaagcaataaagaaaaacgagaaggtacagaacaagagaggcaagaggagagttaggagggtgtaacttttaaaagcagctgaaaactgagaaaatttcagaaagtgagaaggtcaggtactgaaatgagggggtgttagacagtctcggttcccaccccctctcgagccccgaatagctctgtgaccttgagctcacaatttagtttcatttcctcatttagcaaatgaggggagaagcacctactttatagggctactgtgaggatcagatgagataaaatctatcaagcacaatgcctgggaggttactcctttgtgtttaacaaatgctacctgttttatggaaaccaggacttggatttgtgattagaaggtccgtagtcatttttgctttcacaagtactcgctctcagaattcacagagagtgattgaaaatatatttttaagatgaaaatttgatcatacttttaacttttttggttagaggccagtagaatagcagccattgaaagttttgaagggagcagagggagccaactgaacaaaagtccttgaagagagagtggaagttgcctcaagagcgttgcagagatgttgggtttctcaggacaatccatgcttccgccagtcaggagggtctggtggcatatgcattgtgtttaaaaagcacctggtaattaaacctccaggtttctaatgtcttgtttaaagtactcttagtattttaagtgtgttctagttccttagataatctataaggacattgattatacattttagtattagctgaaaataaactcagaaaacaatacagatgatttcaaaatttaacaaaatgtaatttaatatttgatgattccaaaggcacctctatacctcatagggtcttaaaaatcaacatgtgaaaaataattattagcctgtgtaataggggaaggactgatttgtagaggtttgtttgcttttttttttttttttccccaattaagactactatggtaatatttaaatatacctacttttttcctaggattttctgtttggatgaagtgatgctttatattagagattaataaacattttaaattagatttctattttaatatgtgtataagttttttactctgtaattactgcataatttgagaaaatgtttacatctatgcagtggtttggaagtcaaccaacaattgcacatagtacatattgtttactaattggttataaggcatataataaatatttgttgtcccaatacatgtttgttgaataaaacaaaattagatattccatatttttaagatgaaatgaattttatatctgtagttttaatatttaatcatattctttacctgaaaatcgctagccatacttttcgttttcagcacttctctattttgcagttgtgtttcagtgcttttttttttcccactgtgcttagtccttcacgatttatggccctgttatttgtaaagcatagtaatctaagcaggtgattttcagtttaggatttcttctagttccatgttgtatattcaccaagtcagttttagactatatattgtcatgctcagcactcccttacagagataacagatgccaagttgaaattgacttatacagaatgccacacttaggtaagtgtttaggagtgcatagccaaaataaaaatggtacctttggtttatgaatggcagggcatctaggacagtgtaggtcagttcgtattctctggatggacatttatgtaaatattaaaacatttagattagatggaaagatgtatagtaggaacatttcagagatactgtttccttgtagcattgtactatttatctgaattgttaatttggaataatcactatattgattttattttgaagatataatttatttccattgacttgatataaataacagaaatgcatctgcaaggaatccagttcattaaagaaatttacattcgtatctgatttggtaaatatgtgcttgatttgggaatattatataacaaaatatttgtgaaatcattttgtactttttaattgttttgaagaaatttaatactcaaaatatttcaagacaccaaatcatgactttttagttattacattaagctataacttgctttaatgagtaaaaactgtggggctaattttcttccaagtgaaacatcaagtttaaataatgtgcacatgaatttacaaagtagaatcaagtgtgcaaatatgctatatgttctgtaataggttcttgaaaagctgtatataaactcagcttttataagttgagtcatatttatagaataagaaaatagggcaaacatttaacacttcttaaatattaagtgatgggcatacagatgtttgttatgttaatctttatatttttctgtatgttagaaatagtttacagaaaaaaattgtggttagtgacattaaagcacattatatattaaatatactcagggactttgaaatttaaagcaatatcaacatacaatttaccatagaaaaaatcctattctgattttattaatacctgttttgcaaattcagaatttttaatgggtttaattaagcagatacacacacaacaacaacaacaacaaaaaacttggacacacttctgtaayacatcttgaatatagtctcatctgttggaattttttaaacttctacacttaagtcttaatctgattctccctcatcctcataatattcattattcagaggagaggcatcaacaggaagaattcaattttacttaaataaaaattttttactagcaacggaatgagtgattcagtggtggtgtcttcctgctttgagagagctgttctaagactaggcagttagtcttaggcctaagactaggcagttagtctaggggctccacagcaggcccttcctctgggttctctttatgaagaaggcctttgtgttttacatagattttgcatttgtgctgctgtccctattgagttgttctcaccaagccaatctggggagtagctcttaggggaaaactagtcaaacaggtttgcctgtctattcaaaaggagggaagaacggtgaaatgtatggataaaggccaagagtaaaactgttttaagtaatattcatgctaatcactgactgttggttttgaaaatactttgtagacatttgtgagaatgtatcttaatggagataaagtaagagagaaactggaaggggaagtagtttagaagcaggggataaggacaagatggggagaaggaagggaaaaacaatggaggcaaaataagctcaagaaggaaagaatagtgtttcagtgtcatatctgggctttatgtaaactgggtgtgttatagcaggaaaccatggtattgatctgagaatgaatttaattaaaacaaacaaaaaacccccacatgcctgtgatcctcaatgtccaaaatagggagcgtcttgccagggcagggctgaagtttactaggaatattggtgggaaaatgttatagttaaccatctctgatactaatcttatattagagataatacttggtttcccctagtaaagtgttagagtcatacagctttattgtagtttgcaaatctattacacatatatttctactgtttagttctcattctgcccctgaagcatagccctataggtagtagcattttacagctcataacttggtagagtcccaagtaacctttggaagtcaaaatgacaatccagtctggggaatttgatgttaaaactaaagcttcttgcctagaacaagttttggaactatagctcaccacctgcctcatgttctgggaatgctgaaccttgatcccactgaaattacctttaagtagtctttctgtagtcctcagtaatctcctcctttgctccatgcttcttccctgctccttgagagttccttctcctttctcatctgtaatggtaactccccatctgatctttggttgtgcctcttcttccttcctggcatttttattaacatcttttgtcccagcacctctcctcttctctattctcactcctttggtgtagttattcatgcccatagactggatttttatttatatatagatgattcaaaaagctgtatttctaattgtgatttcttctatactctcaagagcttagagttcccagctcaacttcctaactcagatctgacatccccatttgcctcagtcttcgaagacagattttggtgttgtggaattcacttttttaccctttatatctaatctattcctaattgatcactatgtccttcatgaagaccttcttcccttgcctgagtctttccattcacctcctgatgtcttggtgtagtcccacatcacttcttcaccagtggtactaaatgactcattttcaccattacctgggccttccatcacctcctactgcccacaaccatcagtcacttgtccttactgacccacttgccttctttgagtgtgatttgactatgcgtttattttcacatggggatccaaaatttttagcatggctttcgaggctgtctattgtctagctgctttctgatcagacttatttattttctcatattgctcaataggattctatcctgtttacccactggggcattcatttcaggatatccccccgcttgagatgtcctgccttttttttcttctgcacttccaaattctcacccaaggttttgacactcaagtcccacctcagactgtggcttcccagtctctgtcacttttctgtgactttgatttgtacatatattgatgttagcaattaggtttcattctccctctaaggagagtatgaactcttagagggtggagtctcttgtctcctcatacaccttggacaaacactattgatcagagagaagatattcaaacatgattgaatggtatctttagtttgtcatgaggcaataagggtaagtttcctaattttctatacgtattttgattttttcctgttgttttttccagaactgcatcattcaaacttgaaacattmccctatttttttttaacaaggtgttctatataggaacaacatatcttatagggattgctacattatttagtcacaatggaaaaaaaagtttgatatatagaaagattatataatagttacatggaactctactataaaattataatggtttagtgggttttcttttttaaatttacctggggcttctataggtggatgtgcattcacaactaattctaggtaatgctaataaaagaaaataatcacggtgataattaactgtatttagtttttattttgtatttacatttcaatgtaagtatgcctaatgtcatgaaaccatagttggagaaaataatgattatatgcatgaggaagataacttaggaagcattctaattgtccaactccccacttccccatagaccttttataacaattaaatcaaagcaccagcccaggaataattcttttttccattctttgtgcctatttcctcctttgataattgctgaattcttctggtcagaatatctccctttccatctccctctgagcagagcaataggaataggaatatattttaagccaggtgaagtggtgcaggtctgaggtccagctactctggtggctgagatgggaggattgcttgaggtcaggagttgaggctcaggctgtagtgtgctgtggagatcgtgcctatgaatagccattgcactccagcctgggcaacatagtgagaccttgtctcttaaaaaaagaatatattttaagaaaattcctcagctaaagtaaaaagaaaagagagataagctaggtaagattattaatcagaagtaatgcttgtctgtttaatttgccagttttaaataattcttgaaggcatttgagaggtcattatattcttttaatcagttagactttatctgaatatatgctttggaatatactttttcttcaaacttctaaactatgtgcartatacagaaacaaggtcctctggctgtcctgctttctgcttgctttttttctctccctttcacttttctggagataatttttctgcctcttgtagggaattcagaggagggatcctagtgattggctttacaaatttgtgtgggggagggattggatagagtggagatgggataggcatctgcccatcagtaggatttggttgtttgtccagcctctatatgggctttaaatgctttatactttctgaccattatttttgccagcaaaaatgatgtagcttattttgatactacttaaatgcagtcctgtccttattctacccctactactccatccaaagggagactgaaggggagacattttgaaccagacatgttgatttcctggtggcctgtacagtgagtattttgtaacatttagaattaattcagtcattcatttaataagtaacctaatatatgctagaaatcttctgtcttagagccaaaatatattgtaattttttcatggtctaagtatctaaggctttacagtataaaagtttaataaagtcatgaccaaggctttacaaagactgctattttgattcatgtatcacagaattcaataaaaagtcaaactattatctgacatatggcagtgacaactttggagggtgtttatatggtacaaatagaagatgctggattaggacctaggaaacctgaatgctggttccgactctgccagcgaataactgaactagctgtgtaatgcaaagacaaccaccccatagagactttgcccctttctctacaaatgaggggtttgaaatcacctatctttagtttttaaattgtgactcatttatttaatgaaaatatatggtttttaaaattttgatatcattttggtacaaatatattgtgtcaatgtttaaatatatttatcttattttcacaagacaatggcaatgatatacaaaagactttctctggacttgcctcattgtggtgaatatcggttataatcatagatacttagaagacacaaaattatacattcttacctgttagtaaaggaacatcaaagaaattcattctgtttttctgcagaaactatcaaaatttttccacttctggggattaagataacttctgttttttatctaatactcaacctatctaatacaaccttgtcctagtgatgatggtagaattttataaaatagggaagtttgttatttgttcacctgtgaagaccttcaaggaattgaataggaaaatacctagagttttgtttcttgttctgatttgcttgtttatatttggccagttttgtcctgaaaatatgtttgagasattacatgaaaatttattttgtgactcttaatataaatgttaaaaatacatttaaactagtgatagtaaagaaagaatatcttaattagtgggggaaataatcccatgatcttttgtgattctacaacattactgtagccttaagaatctctactaatgttgtattgaaaagctgtttctcctacatgtgaatatgtttcattgcaggagaagatgaaagtttgatctggatattctccagattcacttgctgtattctactaattaaaatcccaataaaagagaattatgaagagtcctaacaaaacattttaaaatgtcaatcattgtttttgtattttttaaaaataaaacgtatacacgttagactgtaaagccttaatctcagttgtatgatttgtgaaacttttctcacttgtgtaaagatgggatcagaatcaaaacaattaatttccatattgtttgctgaatgtttatcacatgctgcagatgcgtggagataactgtaccaggctagtcttggggaatttcagaaatagaaacccacatctttttctgtaggataacatagccatatatatccatatatatatatatatatatatatatatatatatacacacacacagagagatattagatatatataatatctatattatatattagatatctatatataagatagccgtatatatccatatatatatatatatatacacacacacacagatgttagaagacacaaaactttacattcttacctgtataatcatagatacttggaagacatatattgtagatacttggaagacatagattcttacctgtataatcatagatacttggaagacacatatttacatatatataaatatgtatacatatatatttttaaaatgaggtatgtgatcaagacgaaagttttaataccactgttttctttattaaaaaggaaaattgcattttttaaaaattacaaacttttatccttattgtctaaatttggtttctggaacagaagcatcagtgttacctggtgacttgttaggaatggaaattcttgggctcatcccagatctgtaaaatcagaaaccatgagggcaggccccacatgtgtgtttgaacaagacctccaggtgattgtgatgcctgctgaagtttgagacccacttatctatgataccagatatctcatcaattcacttttctcacataatgaaaaaattctgatcatcttaaggacaaaagaaaaatttagtttagattttaaaatgctttccaggtaagttttataacctaaactcgtatcttattttacttactaattggttattgaggcatcaacaaatattcttagttcagataaacccacacatttctcagtttattaaaaaaaaacagggttgaattagttgtttattttggtatactttgctatgacattgtacaagtgtagcctagattttcttaatttttaatcacagggaataaaggggaggagggtttaaaaaagccaaaaacccttagtcctaggcctcatccccagaaattctgatttgattgaactacattgtagatggcaggttttcaggcatctctatttttccaaagcttcccaggtgattattatgtgcagttggactatagccatacgttcaaagattggcccatctaccacgtataggtccattaaaaaaattgcacattagatctattaggttcttttattattttaagcaaattgtcctttcatctatgtttaatttaaaaatattttcttttccagtacgttattggtattgttgatttgcttaaccatgttattgatcattttattactctttattcagcctcctggttttgctgtaagtccttgcttattcaaaatgcactccaagcaccagtagtcccatattactagagagcttgtttcataaataagtatgatggggccctaccctacgtctactgaaccacaatttacattttaatagtgtccctataaaatgtgtcttcacattaatgatcctctataacttaaaatttaaaatcaaggtaaattctttttcttttcattttgtttcttagaattcattggtttgatcttaactgctttttatgaaccaaagatatcaatctcattaaacctattcttaaaccctttttttcccagtaagttttagaatagtaagggatattttaaattatcaaatttcatagccccacctgacaggtgaagaaaattagggacataaattaaatgacttggactaaattacaaagggtactgatttggggatccatagatgcatgctgcaatcattttatttttcttttcattatgtgtcacttaaaatgatatctttgtaatttaaactacttgaactgtgagctaactgaaaagatagtcttagattaccaagtaccatacatgtccaaaaaacctcaacattttatatatacattaacaattattttaattatctgtctaaattgatcttgataatgcttttctaacatactacttcaaattagtttagaatttaattaattaagtaataatggggaagttgactattaaacaacatgaaaatgaaaggaactactatatgtgtttactacttattaagtactaaaaatagtcatgtgcttctgagagactgctggtactttgtatatagaaatttaaacagaaagttgtttggaattgtttgttctgagttcctgggaatctggggctatgtgcattatatttttctaaattcccaagataattgagctttaattcaggtctcgatagttggatccacattaccttcattgtattacckgtatttctcttatgcacataagtaacgagtgctagatccctatctgtcagttcggtgggagaattgcataaatatccccagctgcttactaaatatgcagattcttgggtttctccctagactccatracagcttatttgctgaggtgactttggaacctgtatttttagtaagtacttgaggtgattcttctggacgccagaatttgaaaacaacttcattaggtgattatatctttgtgttttaaatagttaaatttaatcaccatcatcaggcattaattggatacatactgtgtacaaggtactgagtgcagtctgttgatattcgtattatcttatttttattttctcactatatttttgtttttatcttaccttcctgcttaatgttttcagagaaactccccaggtgggcctaagccagctatcactgataagcraatagggttgagtttctcattacagcttcaccacctgtactgtagatgtctgaaaagagataactgcagatacttgtgttgaagaagtggtaagtgcaactagcttggaatggtacaacagcaacaacaactttctttataacctctccttcaagaagaggttcttttgtatttctcttggcactcatgaatgttccaggtgcaaaactgaattttttgagtggtattcctaatggtctcttcctttcatatttcatgtgtgtaaagaaaggtctgcctctgtaatactcgtagagatttctattaatcttatttttcataagatggcatactagtttaaggaatggaatagtaacacaatatttttctttatgctcttttaaatgagtttgttatcaggcaaagcaatattttaaaagcaaaagtgattgtgttagaaattttgaccaaaagcttctgacagggaactttggattaatttatttcattaagtttgtgaaatggaaccaaattccttcttcctttgcattcagcatttttcagttttatttctgcagttaagcygtgggcttctatacaaataaatataatttttctgatggaatgaaaaacattaatttagtaatgtggaggattttgaaaatctagagttacttatatttattaactgctgacagccaaactgagttctctctgtgtaaggttttcactcagattgtactcttaaaggtgccagactttttttttttttttttttgggcaggtggaagttttaaccaacaacaggtggcctcaattttctgaattctttcttctcctacctcaaatcagtatgttcccattctagtgattttaggggattctttgcttttagtagtttacttgctaatagccaccataaataacttaagattaccaagaattgcctacagatgaaagatacatgtttaaaacgagggctatttaacaaccaagtagatataaagcttagtttttcccagtttgtccacagttaacaactttttttaagctttcttttttttctctcttcacatggtgggatatgagtacattaatttactagatactagatctttgtcaagtttttatactctcagtcttattatctgtaaagtgggagccactttcttgccttcatgtgatctcaatatgaaatgagataatgtttagaaagctggtaatgcagggggaaggcatgtagcaattaaaaacagctgctgtttattgatacttgtatgttaagtcaaagcaatagggtgaccagctcgtccccgtgtgcccaagactttcctagttttagcactgaaaatcccacatcctgggaaacttcccccctccccacccagttctaggcaaaccaggatcctgagtccccctagggcttccgtgacttaggaaaggtagcttagttgcttcacacacaataatttgggcataagcaggcagggctggtgttatggttttgcagtctcaggacccaagtgtctttgttgttacaccttttctggtttataattctgcctgtatggtctaggatgttaatcattaccatgtctcattccagctggcaggaaggtgaaaagtgaaactccaagggcatacattagaaattgcacatagcaattctgcttccgtttcactctcattaagtagaacttatttatgtgactaaaacaagctattagagaggtagagaaaaattgtctttcgtctttttggctatatgccaaactgaagtactccagaccctttttgcctgggtatcaggcagcagaggctgcagaacagcggatattggtgaacagcaaatgttgctgcctgattgttcctctggaagttttgtctcagaggagtacctggccatgtgaggtgtcagtctgcccttactggggggtgcctcccagttaggctagtcgggggtcagggacccagttgaggaggcagtctgcccgttctcagatctccagctgcgttctgggagaaccactactctcttcaaagctgtcagacagggacatttaagtctgcagaggtttctgctgccttttttggggctatgccctgcccccagaggtggagtctacagaggcaggcaggcctccttgagctgcagtgggctccacccagttcgagcttcccggccgccttgtttacctactcaagcctcggcagtggcgggcgcccctcccctagcctcatggccgccttgcagtttgatctcagactgctgtgctagcaatgagtgaggctccatgggcgtaggaccctctgagccatgcgggggatataatctcctggtgtgctgtttgctaagaccgttggaaaagtgcagtattagggtgggagtgacccgattttccaggtgccttctgtcacccctttctttgactaggaaagggaattccctgaccccctgtgcttcccaggtgaggcgatgcctcaccctacttcggctcatgctcggtgtgttgcacccactgtcctgcacccactgtccaacactccccagtgagatgaacccagtacctcagttggaaatgcagaaatcacccgtcttctgcgtcactcatgctgggagctgtaggctggagctgttcctattcggccatcttggctcccatgtatggtattaaactctggtattttagctttagtctctttggaaaaatgggaaatacaggggatttataaaattctattttcatctttaaaatatttcagtagtatattggggtgttcctgtatcaaatttcagcatatatgaaccattgatacctaggcacagaagcattgtagctaatctaacttgttttctggagctctaagggtttaaaacctttcctttgtgctgtgcatggtggytcatgcctgtaatcccagcactttggtaggctgaggcaggcagatcacacggtcaggagttcgagaccagtttgaccaacatggtgaaaccctgtctctactaaaaaaaatacaaaaattagttgggcacggtggtgtgtgcctgtaatcccagctactcaggaggctgaggcaggagaattgcttgaacctgggaggtgaaggttgtagtgagctgagattgtgccattgcactctagcctgagctacagagcaagactccatctcaaacaaaacaaacagacaaacccttcctttggccttggagaaatcacttttacagatgaacgttttggatgtgcaccccaatatcctgatatcttactgtttcacccaaattaattcacactgaaatgttaaatgacttccctgtggtgagtggtagacacacctattaaaatgcttttggcttcctctcttgaaagcaagcatagaaataatttttaatagaaagaaaaaagggtagactgataatgcagtttgtgtagagtcttcaaatatttgtacattctttgaattttggattttcttcaagattctggcagcatgttactccactgccagaatcttgtagtcaaatagtagtagtatcctagaagccaaaagagaatttagagaaagagagaatcactagtggctactgttaaatggaagtccaaacagataagtggaaaatgggcatttgtatgaattttgggaagcgttagtgcccttaacagtaagaatttggttagaattgtggtggattcaaaggctgacagtaaacatctggggagtaagtggagaccagcaaatagagactgatgttttaagatgcttaactccaaaggaaggatgagagtaaggctccagctccagggatgtgccagctgaaagctgtagaattacctacttttggtagaaatctttgaaaatcctgaaaaatataagaaaaggaaagaaaattgttcaagtccataaccttaaaattgttatcagtttcatctttactttgttatcattataatcactttatatatacatatatatcatatacataattttatttctgatcttcttagtgttatgttacaagtattttctgatattaaaattattttcaaacattatttttgaagttctataattttccatgataaaaatatagtgtaattaaattaatctactgttggctttatagtggtttctggctgtttgctgttggctatgaatgcaatggacatttttctacataagtattggtatctctgtagtgttataaaataatatgccagttgtatttcataacatttacaccagtttacattttcaccaacttcttaagactacactgtgcctttgcaagagttgagcattatcactaaaaataacatccttgccggttttataagagacaagtctaatttgttcatttgttcagtcattccactgtagccctgtcaatgcctcataccacttttcagaactcatgtgtatttattttcttttatattcttcactcaaatttccagtggagcttcgggagaaaaggaatggaaacacttgttttaatctgccattttaaactggaaacctctgcttgctccagatgttctaaacattccaaaaatattaatgattgtgcatttaaatctaatatttgtaaaagcaattgtttgctttgctttatgcttatttttttctctttccagataatcctttaaagctaaacatttttaatggatttatctaaaaacttttaacactgtgctattcaatttactttaaggaaggtttaaggtaaaaaatatagtgattttatttttcaaatataaagcaaatttttaacactattgaataagtttttctttcctcatctatttgtggtacttccttcgtcatctattaggcttatatttattcagggaattccaataggcttcctacactgatgcattgatttcatgtagaattcttgggctaattccagtttttaattattgggttttaaaatatgttttaagatttatatggatatcccaaatcattactgtttctttttcaaaaatgtattctctcttctttttatatttttccaatgaacataggtataattttgattaaatttcgaacaaaacccaacaatcatccagtgggatttggaagaaatgtatcagtctatttataacatgggaaggattaacttttagaatattttcttttgtgaaaacaaaagtgtttctatacatttagaaaatattcctgtgtatatatcttcaggggaagtctggccatgttacaggcaacaaatattctatgttggtaatgtaaaaggtatattgtacactttattgttattgtgaatgaagtattttttcatcatatgttactttaaaataatatttatttttatttcagtgagagtaacacatgcgcactgtggattcctttgtgaatacataaaaggaaaagttaaaactcttataattcacactatccagagaaaaacaatactattttggcaagtatcattcccatatgtgtacacatgtatatattttgcaaagtgctacatgatgtttataatgtttagtatcctaattttcagtcaacatttaatcttgaatatcttatgccatattctttttataagatttttctagtggctgcattatatgaatgaatgacagtgtatttaaccaatccccagttgttgagaatttaacataacttcaagatttgcagatggtaataatcctctcctgcactaaatgaaatcaggagaatacttagggaagtgaaatatctattatgtatgttgcaggttgtatttctgagatatcatttgtcattatatttgtttatggtgcatttgatatgtctgcatattttatttgtattgcttagtttgttttctattgagtatttttcaggtttctttaatataaataatattggctattataataacataattatattaaaatataagataattatatcttgacaatgctattctaaaatataagcagttcattaaaaattatgtgatttctttttactttgtagtaattactgaaataaaatattaaaattaaaaaggaagaattaaacaaaagcacagtgaaagcatttgttctctatgatcatttttgttttaagttatttatgatagataaagtagttttaactgtaactgaacagagtgtacctatggtctgctcagctagatccagaacccagtggagagaccagttttctaccattgttccatcatcaagtactcacctctcgaatatgcaagaagtgacagcagtgagcagtagctgctggaatacctacctgttttggcattagtcttatccctggagttcatatttccttgtaaaatatctcatttttccttcttcagatttgtgagaaggcaacattggagagacacataggtgaggcagtacagtagaataaacatttggaaggtttttctaagatcagctccttaattttctttcttcactgatcttgtaattgtagtcaactttactatagaatcagtatcttctccaaagttaattatttttaaagccttataataatgtaagtgacatttatattatatgtttgtaatgtgcattacttttacttattcttaatggtataatttcaactttcaaatagtttgaaacttcccttagagtaggagaggaaaaaagcatctggaaatatatgtattttagagttcaatcttgttattggaagaatctattagttgcctgctattgatttctttacattgcttgtagtgtttgaatgtttagaaggtatagttgttaaaactgcgtttagatgttgggaatttatacaaataggagggttaatgtattctaaggagtaaaaatagatatcaatttggttatatgtgtgttggtgatgtgtgtataaatctattttgagatttttgaaatgtgtccagtttgcatgagcaattgtttagatcttttttctatttgggggtctaatttagagtctaagaattcattatattgaataggttggtgggtgtatttgcacactatatggtccccacgtatagtatatttatctctaaaaacaataaaagacaactttattacacatatctgttaacatgaaaaggtaggagaagtactggccctcaagtgtacaggcatcctctgacttgacatttgcacctgagttaaaggtacaacatagaagtgtggtctgagacataatcattcatcagtcctttttcaataagtatttactgagatccattaaccctcttgagcttttctattaaaagtttctcttttacataatgccctgaaatgcatcagcaaattgacatagattacataaatatagattgctaggacaactatggtatttaggtaaagggaaaatatatgttaaagatcatttttcctctggaaaaaagtcttttctgcagaattaccaaactaccattcaaaataattattttctaaaacaatctttctttggtatgctttgattataactgcaaatgtaaccattgaattaaaatgatttaaataagagacacgtgctgatatacctggaaattaaaaaggtcagctcttcttcctgggattaacattgacattcaattagaagatgaacagatgttccatagatatttcatagatattcttccaaaaagatatattatgtgtcattcagccttatcaaaatgttatttcaaatgtttgaaaatagtttactgattcaattttcttcccaaacagatccatttttaatatatttcagtttatgtcaactttgctttcaattctatacttaaacataattgatctttcaaaaataaagaggtaattagaacaaatatcaggataatttttaatagtggttttttttgtatgttagtgtataatactatagaatgcattctttttttttattattatactttaagttttagggtacatgtgcacaatgtgcaggttagttacatatgtatacatgtgacatactggtgtgctgcgcccactaacttgtcatctagcattaggtatatatcccaaagctatccctcccccctccccccaccccacaacagtccccagagtgtgatgttccccctcctgtgtccatgtgttcccattgttcaattcccacctatgagtgagaatatgcggtgtttggttttttgttcttgcgatggtttactgagaatgatgatttccaatttcatccatgtccctacaaaggacatgaactcatcattttttatggctgcatagtattccatggtgtatatgtgccacattttcttaatccagtctatcattgttggacatttgggttggttccaagtctttgctattgtgaatagtgccgcaataaacatacgtgtgcatgtgtctttatagcagcatgatttatagtcctttgggtatatacccagtaatgggatggctgggttctagatccctgaggaatcgccacattgacttgcacaatggttgaactagtttacagtcccaccaacagtgtaaaagtgttcctatttctccacatcctctccggcacctgttgtttcctgactttttaatgattgccattctaactggtgtgagatgatatctcattgtggttttgatttgcatttctctgatggccagtgatggtgagcattttttcatgtgttttttggctgcataaatgtcttcttttgagaagtgtctgttcatgatttttttttttagacaaagtattagatcagatatttttggggaaaaatgctttgtgattgcttgttttgaatggtgagcattgtattttgttttaagttgttttctggttgttattacagctatgaagtcttacactccatatttcattctcctgtggagtgctgttgggatagcgaaggctgccaaaatcatcatcgtgccgccaattatgtttgaaagccatatgtacattttcaagacgctagcctcagccttgcacgagagaggccaccatacagtgttcctcctctctgaaggcagagacatcgccccatctaatcattacagcctccagcgctacccagggatctttaacagtaccacctcagatgctttcctacagtccaagatgcggaatattttctctgggagattgacagcaatcgaactgtttgacatactggatcactatactaagaactgtgacctgatggttggcaaccatgccctgatccagggtctgaagaaagaaaaatttgacctgctgctggtggaccctaatgatatgtgtggatttgtgatagctcatcttttaggggttaaatatgctgtattttcaactggcctttggtatcctgctgaagtgggtgctcctgctccattagcatacgtcccagagtttaactcactcctcacagaccgcatgaacttgctkcaaaggatgaaaaataccggtgtttacctcatttccagattaggggtcagctttctggttcttcccaaatatgaaaggataatgcagaagtacaacctgctgcyrgagaagtccatgtatgatttggttcatgggtccagcctgtggatgctgtgtactgaygtagcactggaattcccaagacccactctgcctaatgttgtttatgtaggaggaatcctaaccaaaccagccagcccactaccagaagtaaggtttgccgaattccttggtaattcttttttaatgtaaaagtcaattttgatttttggaagagatatgatttgttatttatatatattgtatatatacagtacactaaaaggtgattaggacatggggcctccaaagtccctttatgtgggtccaccacttccctgggaaacattcctgctttgaatgagcatttctgtaatactgaaaagaccactatgccatatggtcaatagactgcctgggaagtagttttctgattaagtaatagttatagtatgtgaggagaatatagttaaatggttaattttaatgagtataagtgattttatctttaattacacacagaatcccctctgttctgccccaaatagcacaattaacaggtatatatgtttagcttcaggtcagtgaacagaggttcttctctgggaggttattaccactagtttatgtccaataatgaaagtgaggtggtaacttccatcaaagtagggagttggttaatttaagctagtaagtaaatgtaatggttttaaggaaagcatgctctattgcaatttcatttcaatgatggaatcaatggcactttaagaaactctgttctctatgtgaaacttaaattctttttattgattgagccaacagtaaatcccttggtattctgttcaccatccttgttttttattaggtatcccacattagcagaagccatacacatacctattgttgtagtgagttttctaacctcagattgaatctctcaatttaacctcaacatcagatcccatttactaggaagtgtagggcttgttgcaggactttattcaagttacttttaatcctacctctggaaatagccactcaaaacaattttgctaaattgttgatttctagttctggtactacatattaaaaattctatcagggccttgatgaagagtaaatccagattttctcgtatagatgaggacaatcacatggctgaattttgtcgtgaggcaataaggtgattagaaatatacgacctgtaggcttttctaatatggccattagagttataattaataaataatatatcgatatatttcatataacatggaaacagaaatggcctgtacacccacagcatttcaaatatatacagccactggaggccatgagggcacacttgttctctctgacgtcaactgtaaaggatagggattaatctcagcttatcttagccattcttgaatttatccaagctcattttgaatcctcagatcttctctggcagagtcaccttcctaaaggtagctaaaatcagattttagaagtagcttctaaaagatttggtaatcaaggtgtgtctttaccttaactgagtcatttaaaatgttacacaaatcatccttgttctctctaggtcatcatcttttccgagctagaacactccccttctgccagctccctttggttttcatctgggtgatgtctctcttcttcagtcacttgattgaagaagaagtatatgatgaaaaggagctggacgcggtgtcccatgcctgtaatcccagcactttgggaggccaaggcaggaggatcacttgagtccaggagttcgagaccagcctggacaacatagtgaaaccttgtctctacaaaaaataaaaattagctgggtatggtgatgcatgtctatagtcccagctactcaggaggctgaggtgggaggatcacttgagttcaggaggtcgaggccgcagtgagctgagatcacaccactacactccagcctaggtgtcagagtgagaccctgtctaaaaaaaaaaaaaaaaaaaaaaaaaaggaatgtcctgtcctgattgccttttctttccttccagttcctgctgtatatttgtcttgagttgcagcaacttgaatgacacagtataagtgtaggaaaatattttatgttttattttcaatactctacctttcaaaaagatgcatagcatgtgataattttttttctaccatccaagcatttttttctgtcatggattcctctgcacacagatgtccttactagtgtcactattttgttttacatgaaaaacatctttttagtggtttttggtgctcgacataaggtattactcaaaatatcctttaatttgccataatttctcatttgacactggcttgactttctttgtggagttctttttcctctgggctatttgtagtggttcttttgaaatgcgttttttgtttacaaagtttgctttgtgccagttagtttggttgcatgcacagacatggcatgtgtgcatgtgttatatatagtatgtggacatagataagtatattattattattggaagtctattagattatcattgtgaagggctgttttcatttcagaatgttatttatagtttttgagcagggagtattttgaagaatgatgtgcagtactctttcaggtattccttattctggtgtggttttatatgcttatgaacacatgttcccactgagatttttctagtagatttatttgagataataaactgtaccttttcattctaaaagttaatgagtttctcaaatgcctgtattatttacagggcattgttgtgacagtaacacaggaaggcccagaagtagctgcgtagaacacatgattcacatatagcagcttaattgttaattgccctggtatcttacactgggcatagattaggttttccagatgtctgtaaatgattttacagtgggactgaatttcacaacctgggatgaaagggcagagaaaatttataaaggacattttaaataagctttcacaatgtttgatcctaaagaaatcctgtagagagcatatagttcggctccattccttttatttattctttcctttaaagtaggtagaatagagatagggaatagtccatccatttctcacatagtagatacaaagacttcatcaaaagccacacagatagtctgtggcaaagtcaggtgtaatgtggattgttttgctatttattaggtgttttttcaaggtgattgcatctcttgtcactaattttagtcatttacttacttacaattgtgtataaaaccatgcagagacagcagttttttgaatcttatttattttatgtctctcaaagattgtcagggcttaatactcaagtcaaatgaaaccatatggactcttatttatgctttagagatttgataaactaaatcagcctaagttcaaatgcttttgattacaaaatgttgtgtcagtgtagagtgaagaaattgtgtgccttgatagtagaaatcattttaaaatccatgttagaaatgtgcctggaaagacaacttatcatctactacctggctgcctctaataggagtctttaaacaatgtggactaaggggaagaattctgagttggatcacattcatatagtggtttacctactctatcattgcaggccagtagagaacatggataaagattaaaaaataaaaatgctttgatcaagaaggaggtctgtagacaggtccctatttgaatagattctttttttttttttttttttgagatggaatctcttgctctgtcacccaggctggagtgcagtggcatgatctcagctcactacaacctctgcctcccaggttcaagtgattctcctgcctcagcctcccaggtagctgggactacagactagtgctaccatacccagctaatttttcgtatttttagtagagatggagtttcaccgtgttagccaggatggtctcgatctcctgaccttgtgatctgcccgtctcggcctcccaaagtgctgggattacaggtgtgagccaccgcgcctggccaaatagatcctttaaatattaaatgtgaatgaaataatgacatctaattggaaagtgattttaatttttattaattttattagcagataatccaccaaagaatagtacatgtttacttagggaatctaatagttattaaaaataaatgtttcaagtgatactttttagatgatttcccattggctgaaatggcctacgctgccaggcagttgctctctgccacttttcaacttctacagccttgaactcttatagcacctaatagcactttaactactgtttgctgttgttgtactgtttttgttgttgtttgtttgttttacatggctctcttaactagaatgtgagtacctcaaaaggttgatactctataacctgagtgcctgaaaaatggttggtactcaataaaactttaatatttaatgaactgtatcaaatagaaatagttgccaaaaataggtgattcagttagtgcaacaatgttaatattataactatcatctgtttgttctaaatttgtgtctgtatactgtcctagccattaagcaacccaaaaatccatgctaagttgttgagttttttttttaatttttattttttgagatggagtctcactctgtcacccaggctgaagtgcagtggcatgatcttggctcactgtagcctctgcctcttgggttcaagcaattctcctgcctcaccctcccaagtagctgggattagaggtgtatgtcaccacgcctagttaatttttatattttcagtagagacagggtttcgatatgttggccaggatggtctcaaactcctgacctcaagtgattcggccaccttggcttctcaaagtgctgggattacaggcatgagccactgccccagctggtactaagttattttaatgaattagaataactattctaatgttactgatagtgaggaaagaagataaccataccattacccaattgtgaactaaaatagtcttttctctcttccaaatatgcatataaacaggggcagtgctgaaagtcaggccagctattgctgtcttgaaagatgatttgaggcagcatggcactcatttggtgctcttcagagatactgtatttccacattaggagtatttatggcatcttaagttcaccagttgtggagacatttttatttaaggaagcatagtcttggggagagataagagataaacagagataagaaagcacatgggaccagggactagaccaggagatattcactgtttgtcattttgttatttgctggaactccctcagagaatgatcttggggacaatgagagattgagcaacagagttattagattagccacttgtgagcaggtaagtttatgagaagaaaaatgaaatgaagaaacaaaatagtgrctttccatacttggtattcctgattaacatagaagccattacttcctattacatatggtgattgaaagctggtttcaccattaatgaatgaagtctctaggcttggatatgagaccagggtccttgggggtaaaagacttgatccagggttgcagcagatgtggaaaattaaggccatttttattaataattacatatgcaatttgttatcttatgaaatttaaagctggagatgtaaagcttcatctatatagtagtactatgctatgttgttagctatgtgggggtcagaaaattgaggatgacaatgtttagaagagactaataatttcattccagttactaattctgagttcagaaatgttagtactttaactactgtttgtttgtttgttggatggctctcttaactagaatgtgagtacctcaaaaggttggtactctataccctgaatgcctgaaaagtggttggcactcaataaaagtttaatatttaatgaactgttaaatgatagtttggcagaaaaaataaattctctaagggaactcattaatgtaaaatgtttttgcagatgctttataggttaatcatgtattttcttattattttgtagtaagaaaccaaatttatagtaagtaaccaaatttcttgttaaagaaatctatccaggaagtaagtaaatcaagcactgttgaaactatcaatgacttaactgttcagttcactgatagaaaaattttctaagcaacattgtagtttttaatagcttgtcatctgcttctgtaagcattatgggcttacaaggatttcctgatatgataggagatccaatatatgaacggaatcaaacaaacttgttttgaattgatattgcaagatctgacatgattttaactccagcacacattgttaagtttttaagctttaataagccctagagaattgttcatttaggtattaagtcaaatactggcaatatttttaagggaaatatttttaactgataatttttagaaatgacaaatttctcaattaaattactgttgacaccagttttgggggatgatattcttcacaaatactcttattctaagccaaacaggtctatttatgaaatttaaattgctactgccaaagggtttgtcagatctatttctgagctcagattttgtggtgtaagcatgagcttgtgacaaatcagtggcactgaagacaaactacctattttctggctttgtatatgaaaaattgtatttcacctttccaggtattgttccttgtacaaaataccaaaatggaaaaacaggggcttttttagtcaaatggccctgacttttagtcttatcttcatacgactcttttggttaaaggaatcagcctaattaaaatgaggatagcatgttagtacttacttcagaggacttttggtatatgagarccacgacaatacctggtggtggcagttattactctattactcttattattactgtaataacccttgtaacttacagtgagccaagagtatggaatcactgatcatttcttattttccacatgctgaggagaagaatggttctcaggagagtggatagagatgtaggagggatgtggagcatctatggtttcacctctcttcattcgggctgttgacactggtacttctgtttccatcttggggattttttttttttctttcttccattatttttcttagtgaagtagaaggacgatgacaattgtgtgagatacgtggttcttagatcacctggagtttcttaagaaatgaacagaaattgatagatatatcttctctagggtagaaagaagaattaagggagtagcttcatcagaatgctggcttctttaacctctgggacactgatttttcaggcctttcagtggaggaactgggactccagcccctcttctgctggctccacacctatccattctcctgactctgtgattctcatttttgagggagtttaagggagaactctaggcaaataaatgattgccttccttctagcccagcattgtactgaatctcctccacactcagaccctgaagaactagactcagtaacctagaaatgccaaaaaagccttagtagtttcttctaagatctaaggttcagactcggcaaccaaccccaatatttatactgacttcttcctatattatttattaggttggtgcaaaagtaattgtggtttttgtcattaaaagtaatatcccagcagggctcagtggctcacacctgtaatcccagcactttgggaggctgaggcaggtggatcacctgaggtcaggagttctagaccagcctggccaacatgatgtaaccccatctctactaaaaatacaaaaaaattagcagggcgttgttgtggtgcatgcctatagtgccagctactcgggaggctgaaacaggagaatcgcttgaacccgtgaggcagaggtcacagtgagctgagatcgtgccactgcacgccagcctgggcgacagagtgagactccatctcaacaaaaacaacaataaaagaaaagtaatgtcccattgtatcctttgtattttccttcagtattgtattctctttcagtattgcttagatcagaattccatgaaattcctgtcggcacgtgattgtaggccacttagtagatctggggtgggtctaataatttgtaccatgttacctggtcatgctgatactgttggtcagatgaccagccactatttgagaaccattaatttaaactcatacaatccatgtgatccataaattttaatagcattgcgtaatgtattttgtatgagaatcttttttctggtaattaaagattttctctgttttagaaagttattttcagtgtaaattgcacccaaacaaatggatatgtatctagatttcaagaactagaaaagccctggattacactgtagatctgaacagctcattaccttacagttccactttgtgaaactaagatgatgctgttgaatgatcagttcttgctttaagatatagatctaaatagagtggccatgtacagccatgtcartaataggtaagggcctcagaactaataactttcaactcttctccctgttttaattcatcttcaccatttgcttttggccttcgagtatattttggtaaagcagcatttattgctgtttgtaggaaccacttctaggagaagattcaagaattctgattaatataaacatagagagttaattagctggttaacagagcatccattctagaaagagctgtgagagatgaaaatgctattagataggagagagaaaaagagacagacaagcatgtcttcctttgtcctaaaacttcaaagaagttcctataaaagtggtcatttacatatagtatttcatttgggtggcttttgacagggtggattttcagaaaaattatggtgttcaaatgcaggaggggaaacttaagaccacgtggtggatactaacttcccttgattttcttctgcttttttccttccttgatatgtgatagagtaaaaataaactttacaaagtaagctgacttggttctacttcattgaatatagtaactacttaatgaatgtctattgaatcattttatactgaattagatttagagaaaaggtcttctgatagcatttaaaaagatttgatttgcacagatctttaagaaaaacattaggttctaaggaattttaaatatttcagaaacaaataatggaggaagcaatactgagggatctcaggtcagtcaacttttatgtcccacccactttcattcctagtacgacagtacttgcacagtatgggctttaatacatatgttttgaattaacgtaatccraagttgcaaaagtcaatacagttgcctaatttattttgcaaaaatggaataaaacttttattacactatgcatttccagactttttatcagtgaaaagcaacttaattgacttgataaatattgttaaaaccttggggctaactaaattccttgactaccattttcaggccatgatgagaaacagataaaccgacttgacttttttttcactacaaagtcctcttagaactttttcacatgtataacattgaaaaggttttacaaatcacaaagagatggccacacttaaaaaggatagatggccatttagttatacattgagtgcagatttattgggtacctaatatgtgccaggcactgagctagcaatgttaagtgcagttcatggtttttttgtttgtgttgcttctagtctaataggggaaataataaagatgtaaacaaattartatgatgcatatttccaaagctaaactgctgtaacagaagccaaaagaatgcagtgatagaaaataaggagtcttctcagacaatcagagtaatgcctcctgagaaagtggagagagctgatggaaggagagtattccaggcaaccaacacccaccccaaagtgggaaggactttacattttgaagaactgagaaagatcagtgggggctgagaagctgatggcatggagctagggtagagtgactgaggtgaccttagagagatgaacagagatgatatcatgcaaagccttgttcactgtccaaggtttggatttccttctgaggctttagatgggctttaacatgattggatttacttttagaaaatccacactctgggccaggtatggtggctttcgcctgtcatcccagcactttggaaagccaaagtgggcagatcaagaggtcaggagttcgagaccagcctgaccaacttggtgaaaccccgtctctactaaaaatacaaaaattagccaagcgtggtggtgtgtgcctgtaatcccagctactcgggagactgaggcaggagaatcacttgaagccaggaggcagaggttgcagtgagcccagatggcgccactgcactccagcctggaggacagagtgagactgtctaaaaaaaaaaaaggatcactctggttgctttgtggaaaaagaacaataaaaggggaagagaggagacaggcaggatcaattgggtgaatgttgcagtagctcagaggtgcattgatggctgcagagatggtgagaagtgggataattccaagtatatttgggaggtagaattgaatggggtgaagttgagtgatgggcggttctaaaaaacccagttttcttgcttgagcaactggtggatggcatttccttgatgcgaaagagtaagggatgaagaagttctttaggaaaatacattgtttagttgggggcatattgaatttgagaaacctgtgggtatatgagtggattcaaaagtcaaattgatgtttgaacatgtgagcatggagttgataggaaaggtcaatgctgggtattcagttgtgggagttaccttccaagagattatagtaaagccatggaaataaatgcagtggcttatcgactctccaaggaagaggaggagggaagaggagtctccaagaattctgagaagtcatgactaggaaaggataaaggataactagaaaaagtgatatcataggtccatcctttattggtgttggtgaattggatgtttccatgagttagttgggtatgtatacctgtggtcctgagtcactggacaattttagttgttgctaagtagatatatagtaataaatgactaaacttatactctcctttaacaatcttcttacatttgtggcatcagaccattggtagaggtgacagagtactcactgggaaccaggtgaatatctagtccttgacaagatcactttacctttttttatcactaaattgtgagtgggtcagtgatagggcttggacggtctttaaagtggcttccacttcagtgatggtgtgaaagagaaaattttgagccttatacatacattaaaatacagacttccattcttaaatcgttcttatttctagtgcagttggcagatctctgataattcataaagctggagtcttgcagaggatggacaagtgagaggcatagaaaaggatcagttttacaatttgtgtactagtgaagctttttttttttttagtaaaccatgaacaataattagaaatagacttaagacaagtaatatttgttttttaaaaaccaatgattaaaaattcaggccaccatcacttgaggtcaggagttcgagaccagcctggccatcatgatcaaaccccatctctactcacaatacaaaaattagctgagcatggtggcacgcacttgtaataccagctactgaggaggctgaggcaggagaatcacttgaagcccggaggcagaggttgcagtgagctgagattgtgccactgcactccagcctgggtgacagagtgagattctgtctcaaaaaaaaaaaaattcaagccaccatattatttgattttgtacaatacagaaagtacatatttttccccagtgaatataattgaattaccatttttattgaaagactttttttcttcaactataatcttaaagagaattttgaaatgcatcaagccatatacataattttcttaccttttaagaattatacctttcagctttttgtgatagagaatttgtggaaaagattttgtaaaatatttatttagaaacattttaaggaaaaaattgaaattatagaaaaatgcttcaagcttttgcaaatttattttggtaaagttcaaatgctttcccccctcataaaaaagatccatttatttcagttaagwtttaagtatatcgctttgtaaataaaacttcaaatgaggcttgtttaccagatctttacaaatttaaagagcagaaatgtattctgatgtgtaatttgaatcagtttcctgttatgaagacagaaaagtctccattgtttccaatttttagaagcattagatgttacaagaagagataatgtaagaatgaaaagagaaattatttatgtactagattatatacaacttttcatatgaatacaaaaaagctcatttttcagaacatatgggattctgataatgttttgatatggatggtatagtttatccctctagacttgcttagtaataactttagtcttttaaaattacggtttaatggaaatcatggtaatatatatgtgatttcagctgaatacattatttaagctaggcttattttccatctagtccacataactttttaacagaaatgtcaaataatacatagatacaagctttattcacatattgtatacaatcagtgcttatgttgattacttctttcagctgaatagggaataaggcctcaaaaggtttatatccagtatttgagtacttttgttattctctttaaaaagtcagtattaggcactactggttactaccagctgaagccttacacagctgtgtatttagcatttaatcatgctaagaattgctaattagaaaatcaaaccggacaaagcatacccagtggagttgatacaataccatttctgtttgagaaccataaataaataatctttacgcattagtgtttcattataagcatttgtgctgaatgtggcaatatttaacaaaatgttttaactcactagaaataatttcttgatattatcctttcacagaaatccgtaatctctttaaaatatagccagccttatcaaaattaagtttctatttagcctttgatttctctttttttactttcttctattctgctccatttcagcattctgctgccccctctcccttcccccaaacttcccgctgccttctccactctgctttgttttaccctacattggaaccctgtggccacaaaccaactgtagcatcctcagttaaccttattgtggctcaggctccaaaattccctattcccttctctctctctgtgtttttattttcttaaatttaaaccgctttgtttctaaacctcagatacacttagctgcagcaaagaatgagggaaaagacattcattcaacactatgtgttaatggctgatagcaatttaacatattacctttcaagcagtagtgaatattttatactgaaattggaggtctagtaacagtgaggcattagtcaaaagaatcaataccagcagcataatctggttagtaaaagtcagagaggtaatggttccagaggattaggaggacacaatatgaatgcccctaataccagttttatggtccactcctacgggcgattatggctcaaactttgaggaaggaggtaaggcagcattttcatctgcatctcacatctcacggtctttgtgagttctacaatgctacagtgcctggcatggtgcttaacatcctcctgtaggtttaattatttcttttctgatttgagaataaaataggccggacacatcccatgttgctgtttagactgtacatattttgttgagtatgtgttcttgtttagaaatatacattttaggaagtaatgaagttgcgatttcctgaaattcagtaagtacacacttagttttaaatgagctgcatttttaagagaacatttaatggaaaaccaaagatctagagttttggtgtcatttcttctactaactccagtaataaacagactttttctggaggtctcatttacctgaacgacaccaagagctagaaagaaagtcacaaagacatttgagaggccaaaataaatgccaaaatgtccaggaactaacatttatttacttgactcacagtagctgcccttaggccttcatcacgcagagttaatttattccaattatatacctgctaaacagcttggtkattttatttccaagcctatgaaggttaaaaacagcaagtacatttttgaggcaggcatgctgaaagcaatgaatactgacaatttaataacctgacagaacagagagatccagaactacttcatcatgataggcccactttattcatttgcaaaataaagagtttgggctaaacgaaccttcagaattacaggctaaaatacgtaacctcatacttgttttctaccagattaatatattttaaacctctggcagatttttttgaaattaactttaccatagaatacatatatgatatacatttagaatgacatgtggtgcttgttttatttacttaaaacagcaaaaaatacccttttatcattatgatcagaccggaaaatgacacttaaaaatagtaaatcatgtattcatttaaatccagtgactgtgttagctcctgagaagacaagatttagcagaacacagttgatttttgccctcattgaactacgaatcccattattcaacatttagaagtgctatgaaggaaagcatagggtgctgaagagtatgacattagggcctgggagtaaggaacagggtcattatgagctttttacatgagggttccaagggtgttccactgtagtttttccatccctgacttttggatctgtgctaagaaaatgtttactaggtaactgacatcaagaccctctggagagcccagtaactaaagctcattaacagacgaggcaaattttaggagcattcatctgtcctccctccatctgttttccttgctcatttcatttctttccatagtattttattgaaggtcaccacgtgtgagacactgtacactgtcacttttaaactcatctcctgtgacagagagcaaggagctccttcctcctaacatgactgacattttaggtcattctgatctttggttatgctgaatgttctctactttattggaaagtttaattcctcccactggctacttgtttgggttatgaattctctacatcattttgtgattccactaagttttgtaggtctgttgtggcccatttatactcaggcctgactggtatttttacatatctcttactgcagaagattttctagcttccattccaagctcactgaggatttctcacagactttcctaatatggtggggatcttagtagagaatatttatccttgtaaaagaaaatgcccagcccttcatacctatatcgttggcttattctattacttattggaaaatatttattgagtacctgtcaactgcaagagactccattagatgctggagatayaaaataaaatgccgtaaaccttaaagccctcaaagatctttcaggcaatctataagttttctagctcactgtgattccaatgtcctttccatttgtgaaagaacacccaaatggaaataaagaatagcagtctctgactctcttccacactcattatcagactccattcactcagtcattcatcaattctctcagcaaatatatattcagtatcaggacctattccagtcagatactcgaagaacctgccactacaagcctcatcttctaggtgttctgatgtccctggttctcttgtttaacataagaacattcacattctcattaaacctaggtgtagttgaagccaagagttggaatgggattatgtatccagaaagtggtgccatgaaaggtagccttactggcctttagttaatttgtaatgaagaatctgtgttttgtaatctttcccattactttgctttgccttttcttcttttattgtctcttgacttttccataacaactgagcwtggtgccttttggaaaccatctttgagatgacctaaggaggttggttggtactagaatgagcacaggttttaacacaaggcaaacctgtgttgtaatcctgggtttactattactagttttaagtcattgggaaaatgatttaatttctcagaacttcaacttatccatgaaatgtaaaacaataaacaaaataaattgtgttaagtacttggcacacagtaaacctacttctccttagttgcctagtgttgtcttcctgaaacagagcttgcctggaggagaaggggatcatatgaaagcaatgaactggaatcaggatgatggatgccttattgggtgcagggaacatcaattgttgacttcagtttagtgtcatatttagtgcattttcctttttactgttaagatcttatagattgatagtttcatgtaaaaatatgtttgtttgtttkttttttttttttgagacggagtctcgctctgtcgcccaggctggagtgcagtggcgcgatctcggctcactgcaagctccgcctcccgggttcacgccattctcctgcctcagcctcccgagtagctgggactacaggcgcccgccaccacgcctggctaattttttgtatttttagtagagacggggtttcaccgtgttagccaggatggtctcgatctcctgaccttgtgatccgcccgcctcggcctcccaaagtgctgggattacaggcgtgagccaccgcgcccggccaaaaatatgttttttagaagaaaaaagtttctcaggtttctacttctattatattttccaggaggaatacatttataggtattgactcaagtaggccctagctgacatccaaaataaaataagagatttttttaagtgttaaagttaaaaaatatgtatgatataccctaaggtagctggattttatttaattcaaagacatatgctaggagatctcaccaaaggacctgtattagttcgttttcacactgctgataaagacatacctgagactaggctgtttacaaaggaaagtggtttaatggagagcccacagttccatttggctggggaaatgtggaaacttccaccatggtggaaggcaaagaagggcaagtcacatcttacgtgaatggtggcaggcaaagagagagattgtgcagaaaaattcctgttttaaaaatcatcagatcttgtgagacttattcactatcatgagaacagcacgggaaagacttgcccccatgattcaattacctcccaccgggtccttctcataacacatgagaattcaaggtgagatttgggtggggacacagccaaaccatatcaggatctatcttagaaaatatcaccaaaaggacaggctagtcttaccttatgtgaatctctgatctttgtggcattttagtcattgttatcggtcatagagtatttctgtggagaagttctactaaacttttgcatgtgctgtgttcaaaaaaagctggcaggcaatatgtaaatgtaatagttaaaattaatagccttaagaaaagctaaagctaaagcctgaattaataatttgtaatgaatctttatcaactgataatcaattgctgctaaaagaaccacaaaagctctactattggtggcattactatcttcatagacaaggttaccctaaaataagagcatcattaggagcttattccttccctttcatccgtgggagaaatctgttcctctttgttcagtctcactttgtttttattcccacaatcaaagcaatacttggaattttgattatattaaatttgagtttggtaactgccctggatgacccaatcatagactccaattcacggaagctatgagagagttatttcataatttaaaatgttagacctagaaaattttcataatacgttagttttttaaaaaactgtggcgtctgtaaaccctaatggatgctggatgctagacacaggtttattcatatacgtttatctggccagggttacagtgatatgaagacctctaatctattgatgatatttattgattcataaagcgagagattaaccattgtagtaaagtgactgtagtaacccatgtagtaaaccactgtagtaaactggagaaaaacgagagaggagaatggaacagaaaaaaaatttattagatttttggaacctgaaacagaaacaaacttgaataaattataagatcaaaatttctttattgcctgaattaatcttctcattttcttttacactttgacagaaaaaggaaaagttggtagacattatatttttcgatatagctgtgtactgaaaataaaatcaacgtgactgatagtttcaaaagtgaatttgagatgttacaagatgacatgcaatagtttataagttggaaatttacattaaagggatataaataaatatcaataaaaagaggaaagggggcttattatccttgtaaagtagttgagatgggaattagtgctacctagatgcttaacagcctcctcttgttaaaattgttaacaggacccttatgtatgtaatagaattgtaaggtcagatgcagcaacgtgtagctgaaagatgatgagctttttcaacrtatattaacctttgttgactttttttttttagcgatttatatctttgagatagtgggactttctgagtcttctgttctcatttttaagggaaacgatctattttatagtgttgttttgcagtttaaatgggataataaagtgagaaagcaccattttctgccatgctcagcacatattaggccctcaatgagcagtaggtattacttagcttgtagcaagattaacatatgattacaatttttgggggtagagttttattgatgtgttcttccaatatgagactgctcagctaaacctgatattttttaccagctaacttctcaggctgtgactattttgcttcctgaatcctcctatattttcacttgaatgagcagctgtatattgaatcacccagcatggacagctgaataaactagccctcatcactgcagtaaataaaagctcattttatttatttcatctttcttgtagctgttttagtttgtaagcaataggatttgttcgcttgtcatttggctttcttttggtgtatgagaaaaatgtatttcaaaaaaattgttgttttaaaggcccttaaggggaaagtgatagaaaataaatagggtggaattgtttaatgacaatattttagaaaaattctttttaatgcagaatatggtatttttattttgtgaattattatctgtgggtctctgagatcaactatgtgatctctgattagtatcatacctcaatcagaacaaaattagaaacaactactcctttaaaggattatttttgtccacaatgggacatagcttttttagatatttgaaagaagaacaaaggcttttttggttcttattattttaatgttgttttagtttgtataattgtaggtgaaggtccaaggtaaaaactatgaaacagtagtgcccaggacttaagatgcacagtcacatactctctgacttttttgtttgtattaagttataaaaacaatgtctggatgcgggtcaatggcagtggcttctgggtaattaggcagtcatattcaggagaacagaaagaaatactataaacagaagtttaaattttaatagttacacaggtttggagaatgatagtgcacctaaataagccacttgaattacagttgggactaataattaggcaggactgtcctttaaaaaaatagcaccgagccatatagtaaccagaagaagttgttcttgttttgtgcttttccatttggtactgataaagagaaacttatggggattagaaaaaatgttatattatcacatttttctgagtgaagctaatactagttagcctttaaatagcttcagggcattgttttagatagtatttcacaaacaaaagataaatcactccaactgtatttccttctgatagtgctgagcacagtatgtatttggcattatgcacagtaggtactcagtgaatctgttggacaaataaatgcatttgtagtttttacatcagtttctcaggtggtggaaaaactaagacactaagcatattacataagagttagagaaagggaatcactttggctaacataggcatttttttttttaatatgctatttggatcccttaaaagccacaacacatcaaacatgaaatacacatttctcaaactctcaatgcttctttctttctggtttcaagaaatactggtggttcctccttagaaatgtcatctatatttttctgttccattttatttctactcccattttctgcaaattgctgtgacctcgcgtgtgaacaattgcagcgcctactaccctgttttccaggctttacccttcagccatggtgcctttcttctctgaatctaatctacactgaaaacagtgactgaataatctgcaaataacacagcacttgttatgccatttctctcttgagaaatagttcttttggggccccatgtgtaaatgatgataaacacagcctgaattccctctcaaagtttccttatatttttcaaaccttgaagatggttaggaagtctgtctgtgaattgcatgtgtagagtgctataattaattatagcagaagaagctgaaagtaggtttaaggagctaataaccagattaggaatatctgatgctggcagtcagacctacctgttcattggtatccttctcattttatgcctcacagttattcacttcaggtaaactgatctgtttcccatttttaacatcacttcatttggaaggcttcctggaccctttgatgtttttatctgaatcccataacctattttagcatatcacattgaaatgcgatgattcttttactcacctttccctgcttggactgtgatgagttcttggcccctcatttggacctcttgaggtaggcactcattgtctccctgaggctggtatattatagtcctttcataatcataaactgaatggatgaattgatacaatttataatttgtgatctatgcctttcaagccttttgctgcctaaaatgttctatcccttgctttatgcctattaaaatcacacctatccttcctctctttcagttaatgcttattgagtgcctcatatctgcagggtgtgttgagcatggagttgtcaacatacatctctgcatggtccctctacagctgaaagtggcccacttgcctcttaagttatcattcttaggcactactttcacatgtagttatacattcaaatctttatgtcttaatattcctaatctggttattagctccttaaagctactttcagcttcttctactataattaattctgctatattcttctactataattaattataacactctacacatgcagttcacagacagacagacttcctaaccatcttcaaggtttggaaaatataaggaaactttgagggggaattcaggctgtgtttatgttgaagaacattcaatgagcaaaaaaattaacaaatccaaatattggttaaaagttgttagcaagccatgggaacgtgaatgaggataagcatcaagagtttcactaccaagttctctttaaaacaatcccagtggtgattggttggtgagtgcttaccatgaagaagtgtagtgttgagttctttacatgtactatttcattttatcctcatgatatcctatgaggtgtaagaagtattgacaaccccattttccttatcaggtaagagaagatgagtaatatcattcaagtcgcatagcgagatatcaagctcaggtctttttgaatgcctgtatttctaaccactgtttttggacactatagagttaattttttttcatcacgccatattacacataatatttttttgtgcttctatatcacattgttagaaaaataccacaaatggtaactgtgtactaacatttctaatattttayacaagatgaaaagagaaatagagacaagaaggaaaattctcttatggtcatcatagaaaaacctgcttatactaaagaagtagtcatcgaatatataccaatgaccttaagttgacatgtcatctgggaaaagacaatttcacaaaggtagatttgttagatttgtgccttgatatgatacacatgtatggcttctatttatctgagttgtatagggatagattagtgaaataggtagattttacacatttcaggactctgttgatttagcaaatgtttactgagtgcatactgtgagatagagcttgtctaggttgaagggacagaagagagaatgaaacaataatgtacatttttaagcaggaagtcagatgtaagcaattaaatagataactgcacagagacggaatatctttttccatattatgtagtatatgtaataagaagtattgcagagtatctatttattgatctttcaaagtgaattagctcaggagatatacttagatatactgttttgcaagatttatgtctgatatgatacttaaagaagaacttccacaggattgattagtgacaaaataaaagtgcctttcagggaaaaaattctagtttgttttcattgccaattaaaagaaccccgaatcagatatctttatttgaacaaaagagcaacataaactatttgtttgaaattcaatgtgaaaaaagctgctaatttaaggtatatcagatgaacattatatatatatatctgtatatacatacatatatctatatctatatctatatatatatgcataataaaacacttcagccttaatgtcatagaaacaatgtgataaacagtgaagttgtcatcattatgataataatcatcaagagtatcatgggcataatttctgttttaatgaaaaaaattattttccaaaagtagcatttcactactggggtttcacaggagaattaagccctgcagaaagacacacagatagtaccatttccagatgcattcaagagaagttaattcattgtacacaatggacaccttggatagggcattagttctaattctctcacaaaaccagagatgagaaagcaaattggcaagtctcttgaaatagatttccatgctatgtgatgctaataattcatgattatgatgtagtgttttttgatatgcctagaaatgacaatattttttgtttcaatttggtcaaattgttgaggccactgccacgttcatgttggagtcatagtcctgcagaaatgcacttccacaatcactggggacaggcttttgtgaagtttcagagattgagacagagctaaatcttttggaattcagaaacatgactattgatctagggaaagaagcatgtttccgtcactcggatttagtctgaactcttcattctaaagcagtttgattctgtttgtagaagtatacacaactagaaacagattgacaatttcagtggtaaataatttattctttttagaaagtcatattgacacctgtagagattttataaaatatatcaattataactttaatttgtaagtagtctccagtagtattgcctgagatgttataaaagatgtcaactgcttccttcctgaggatctatagtaataatttgtgattttcttttatgtcattacttacaatgacagttaaataataacaaccaatgctcgttgaatgcttttatataccagttaccattctaaacaatttacatgaattagctcttttgtgtgtgtgtgtgtgtgtgtgtgtgtgtgtgtgtgtgtgtctcactctgtcacccaggctggagtgcagtggcgctatctcagctcactgcagcctcagtctcccaggttcaaacgattctcctgcctcagcctcctgagtagctgggactactcagctgccaccatgcccagctaatttttttgtatttttagtagaggcggggtttcaccacattggccagactggtctcgaactcttgatctcaaatgatcagtccacctcagtctcccaaagtgttgggattacaggcatgagccaccagaattagctctttcaagcctcataatatccctagaaggtaaggactgcttgtatctccattttcagattaggagcatgaggtccaaggaggctaagtgactctagggtactggaatttgcaaagattacacagccagtgaggggcagaagacagaatttgaactcaggctgctggctcttaggcatcaccttgcctctgtcccttatatcctcttatggctttgtccttgttcttgacggttaattgacataactgtggaagaaattttgtgaacatagatagatattccaattcatggacaatgtcatgttcttgcttatttttatgtttagtggatgtcagttcggtgcactgtttgccagagagattttcttatttcctgaagactctaaaatccacttaattcagcctgccttctgaggtcctttgcctagttgacttttcatatataataaaagattccttgttttgattccctttatttctcttcattgtataggatagaatgccattccaacatatttcagcttactcagagcagatcagtatgtgataacatttatgtgctttattaatactcaaaagcatatgagaaatgagcagtatgcacttcttgcctgtggtgaggaaggaggggttgtaaatgctgtgagcatgagcatgtatgttcagtagtatcattaatatgtgatctcagacacacagaaaatctggtttttttttttttttttttagtcaaatcggattcaggatacttaatgaatggtatttaggctgtattgtaatagttttgggaaaggcattattttttaaatcttgccattatggcacaaaaatgagacttcaggtatatataatttatttcaattttgtcatggattataattaaataagaatatatttatgaggaacaagctgttgacatgtttttaaaacttcagttgcagagcttagggtagattaatgcctatgcaataaaacaaattcttttaaaggaaagaaaagaatgaccagcaactacaaagtgtttaccagttgcgaaattggttaagatttctttatgtatatcattgtttgtcccttcaaatatatggcataagggaagaaaaagaaatgtaactttggggaatataatataaagtaatttcttaccattgagcaaatttgtaaaaacatatgaattgcttcaatttattaactttatccttctgaggaactttaaatagcctagattatttcacagagtataataaggccatgctaatattttaggatggagggcactggactagaacatagaactggagcttaattctaactctgcttctgattacctcctagcagttaatatctttcttcagtttcttcagctggaaaataaattactaacgcaatatgattttagcttttctttaaaattaaygatgctggggataatattggatagcatattggatatgtaatttctgatccctagggtactagaggttgccaatgtagtgtgggtagagtattctagttttaaagcaactcaaatgacacagagattagtattatactaataatttacattgcagtccttctcaaacctgcacaccacagaggaatcagtttgcctatttgagtgatactggcctagccatatttacagtcaatcagaagcgtgaacatttattgatttatttgaagtctcctgttttgtattcttctttgtggttgcgtcaattaagattatgttttaacacacataattgaaaaaaattaagtagctatacacagtggaagtttatttttgtgtcacataaaggaagttctgagataagcagtccagggtggtatgacaatgctgagaatcagtagggacccaagctgcttcaacactctgctctaccatcctcctgtgcaaccctcaaccccacggtcaagatggctgcttggctgctgcattctggccatcaaatggtgcatttttgttacatctcattgaccagaacattggctagctatgtgtccacacttacgttcagctaagactagaaaatgtagtctttagctgggctgcagtatgcccggctaaaagttggaagttgttactaaggaagtggaggaagtgtcttccacaatgatctacctatgtttgttttcttattttaaaaaaaaacccttaaactttatgaattaaaattaaaatttcatcttatgtcttttatagtattaactccttggtacacttttgtgttttttcactttgagaagtactgatttttatgtgattatttaaattcaataaacactgatataaaattatatgtgagctgctaattaaaagcagcaatgttttggatcagtgggttttttaaccactttcattggtatgcagagattttacccaccctgagctcacatggcgattctgcaattgccctgaggacttgaagtgtattaggatcattgattctcctctcttcaggtgctaaatcttttggggtgactccagctgtgtagtcacatttgttgcctttggagttgcattatttcagaatgcctggcaattggcttgccttggagaccttttccaagcatcttatctgcatgttatcttcctggaaccttttgcaaatagcacttattaaagaatttttccacatttgtatctatttaacccatttatgccggaggttgcaattttttgaatttttgcatgattggaaaatcagaacttggtgatgacttgagcagtaggatataaataactcccacatgcgtagcattccaataatggaacactagccataagtgggtgtgagctattttttaaagcctcatatcttttgaagcagtctattactgcaactaacaaatatattaaagttgatttgtcaatttttacttaaagtataatatatgtattcttatattttatgagatacttagtccaatatcatgactacgatttcccattccttagaaagaattgttttcctggggatgtttctgacttttggtcattggtttttaatctattttgtggcatattcagtttgtcacaatcagtcttcaggttacaggaatccagaagaactcataaattcagggctttgtttaaaaacaacaacaacaaaacaaaacaaaaacaaaacttttgcgcctactctttcactgatatatttctttcttgctttttcatacaaaggttttgattctgcagatatgcaagtttttttctatcctgcaacaccttttttttttcatagaacatgtcatttccgttgcccaaaacatcctttttcatcctgccatttcctgtctctgatatagactttcctacctgaaactcaccttttcagaaactccttacttgattgatcctggaaagatcttatctctactttacttaacattccttctgtacttgtgttctccaattgcctaatcttagactcaggtttttagaacttgacaagatatttgagacctttgccagcatagtttttccttgtagctgttaatttagcggggaaaaattacttcctcatttttttcaattttcattctattgagtagtgtctcttaccgattttcctgtgaagttacatagtaaaataaagtacaccaagaaaatatgcagtttgacttgaaaagacttgacaagttacgattggctctttccatttttccacaattgggaatacttcaagtgttcttttctagtaagcattacttaagcttttttctttatacatgtttctcttttataaatgtagaagtctcacatgtcattttaattttatgtgaaatttaaggcaatttcaagattaaaagcaagaacaaactagttttccatatatacaccacttctgccttcttgctgaaatacactgataagggttttcctcctgccctctctgttacaaacatatcttagattcataagctctttaacatgctcactgttaagcatatgcagagaatctgtcattctctgacacccaggattagaagtagagaatattaatttgtggtacccaggaccttaagttatcttccagaagtcttttgaagtaatcattaatccaaaatatacctgaaatactgaagtgtaactttatcctaaattatcatgtataacaataacattttgggaaaatgtgcatagatttctgaaaagatttacaaatgagttattggaataaactcttatgagttgatggattttttatggatttgatttagcaaacaatgaaaattataagctatcagatgactattgagtgtacacaaattatggggaatacactatttgggatgccttgaaattaaaggaatttatagtctgcaaaaaaaaaatgacatatgtatacaaataattttatcacacgttcaaatatgaacagaaccaaagaagctataaagtactctcaaagaagataaattcttaaatttggcataattagacatgaattgatatagtaagtgacatttcaactgacctggaaggatctgttgaagttagcatttgagctgagcttgaaggacctgttgaatttcaatagatggaagtacttctaacaaaggaaatcagagagagtaaagtcaccagagtggtcagggatgggataagctaagggaatgtagaaccatgtagtgttgatcaaaggaggaagtaagaaacagaaggaccttggatgtcagctggtagttggaccaatgaaaatttcaagatttttctcatgggtattttttttttttttaagtaactagtgtagagaacttgagcattggcattgagtggagagtattttaataggtcttttaaaataaactggttggcattgggaagtgcacttttatgatgggtctaggagttaagataaaaagaaattggtgagaaagtacattttgggctgcttattcaaagacatacctctattacagacttctctgtgagcatagtgataaattgtattaatggaaaaaagtcatggtattgaaggattagaagagcwcataaatccaaattttagttccacagaattggctgtatagaatataatgagatgaaagagtgctcttggcaggtcagttcctttaggggaggctgagggtcatagcaaccccaaatagctatgtttgataactgatgtttattctaacgttggagtctttgctgggtccagttaggatttttatcttattctgatctcattgtttatgcaggaaaagaataagatttatttttaaattgtttttatgtaaggtagtacatggaagagtacacagtctagaaggcactgtatcatggctctacatgtttctgcccaaggtacaaaatctttccttgagatgaccaagccactcatcccaggattaatgtaccattgcccataccgttctggatcgttgactttgttgcaaacgagtttacttcctgaatagttgtagaaatagattatgaaaagtggggagtgagatgaaggagaaagggtgatcaagttcctagttttctagtctatataatcacttaccccataaaagttaaagacttctcttcccttgaacatatatgctattcatgctcataagatagaaacactagagctaatgaaaatatccatgacgttatagtcgtagaatatgaccttattgcatattgtggcctttgcctagctttatacatactacactaggcatttaagagaagctgactcaagtatactttgatattgtcattgacctggaaggatctatttgagtgatttaccctggaaattatgtgaatttgacctgttttagccaagtcctgcacttactgtctttctctatatagatgtataatctagaaatgctaaatatcagtattacattagaaaaagagaaattttctttaagaagggattctttagttgccaatgaatttttgacatataatttaactgattataaatgtatttctaattggtttggaaatgttggtgtgcaacctttaattgcctgtcactaaactgttcctttagaaattcaactctgaaatcaagagaaaactgggctacaatttacagagatttaatataagtgcatttttggaaaatttattatttatttttaggctctttatttccccagtcttcagggaggaagtagggcagaggcagtattaatgtgctgttaatgaagctcatgaatctgaaatggactatgaacttctgaggaggaaaccatatcttgctctcttatattcctgacacctggtgcctggcacatagaaggtgaccagcaaaagtttgttaactgatattgaattattgatgaaatgaatatgcatgcaggttaaacaagatctgcactgcgctctgtctttgttggtaatatcagtggacttcaaaagggaatatagctaccagaattattttggaaattaatttggaaatgtagtaagtattacattttctttgttggagtattaatgaagaccataggttaatggattagaagtaggttatttggtattattggcctcaactttatccactctcgtattttcttagaagagataacttaatgtgtttaaagtcacaaagtaggtattcagtgactgttggttatgttctattctccctgatctttatgagaaaaaaaaaatgttagggacctcatgtggatctcttagtgctgtttttcagattccatttatgactcttgagaaagaaaccaaatgaagatgcattagagacatttcagcccctagagctgcaaaatctaccctagtaacgtttaagcaaccacctattatacctatagttgaggaattcagacagaatagcaggaacaacttttctgtgctctatactgtctggggaatcagctagaacacttgagagctagaggctggaatcatcctcaggcttgttcagtctcatgtttgacagttaaaattagctgttggctgagactttagttgagctagtagctacaacaccttcccttgtcttcatgttgccttctttactgatatggcatagtgtttggaaaagaagggtgcattttgcaagagagagagaagtaggtgtcaagtgtatcttttgttatctaaccttagaactcacataggattacttcttctgtaatcagttgaccagagaagtcacgagtcagccaaagcttacctgcccaagtttatacagtgtggacgtagcacctcttgatggggactttctgaaaacacatgtgggactggaaatactaatttagctgtttatgggaacatacagtctgccacacaatataattcctatgtcttttgcaatggctttataattttcaagtatgactgataacttatatttccctacattgtttttacaaaatagaccacttaccaattcccggtacctagttttttgttttttgtttttttttttgtaaagtaatttgcagcttattatgttatttagatgctgaaattgatggagggaagtttaaatttaaaaataaaaatcgattatctagatttttccacaataaacttttatttatttagtttgcatcatccagaatcctgggatatttgtttttgtttgttttgtgtgttttttctctaaaacagtttatttgggaatagcaagggtctgcaatgctggatatgcatgccattgcagaccatggatgcatctgtgaggggtttggagtaaggggaagcttttagagacaaaaagaagtccacataagttgttttgaaacaaagattattggttacaggggcttattctaggtggtggtgtttgttacttggtggtaatgcttgttgatagtaaaccatgtttctcatgtggaattgttaaattgaaagctgtctttttttatttaatttttcttttgtaatataacaatccccaactacattatttttaaaacaatattaagtctgcaggaaatttgcaaactcagttcaaagttattttttttaccagaaccatctgacaataagatttctatatgataccctgtcaccctccaaaacattgatatatattttgtgcacatgagggcatttttctgcataatcacaatacaaaccataaaaataaggaaattaacaatgatatattactaccatctaagttttacacctcaatgaagttttgtgagagccactaataatgtccttaataaggaaaggatccagttcagaattatcagtggcctttatttgctatgtctttaggctccttcttgaacacttactcagtgtttcttagattctcattgttttgatgttgttgaaggatatcggcctgttgtatagaatgtccctcaatttgggtttatcatttgttcctcataattggattcaggttttgcatccttacaggaatatcacagaagggatgctatattctgcatgttgcatctgattaggtggtacgtgattttgacttgcttcattattgatgatgtccactttaatcgtttgattaaggtgttacttacaagacttctttgctgtcacattactaattttacttggtagtcagaattggaagctatgtaaatatttctcatcagtctytgtgtctttatggcataatactgattatcatgaaaaaaattgagtgttttctttttgtttttgtttttttttctggaaagaaaggaggcagacagattagctagcaagactgcctttcttttgtttatgtaggtcacataatttagtagctaagcttgatttttgaaaggagacatttctttaaagtgctcaataatttgtttaaagttctagggaaacgacagtgttatttatcctgttaactgaatggcaaaataaagcagtgtacttgctgtttatcctttcaaagacttagattactattagctttcttgatttattaaaagaaataagtattgagcacctactgcatcttacacctaggagaagaaaagtcttgtgaataaactcacatgctacaagaagtgtggtaggtgccctgttgaaagaacaggtctcacaggggagaacaatagaggagatactttgttgtgatcttggtaaataactgtgacctgagggggaagtttcaggcacccaaggcaggctgtatttgggggagtgaagagtagataaaatattggtacctgatgaatctgaggccaggtttcaatactttatctgctcttcatttccscatatctacttactgtaggtacggcctcattaaaaaatataaactctctgaagacagaacattttgtttatttattctttgatatgtcccaagtgtcagatatggtacatagcagctggtcatggctatcaaataatcatttatcaaatagtgacccagaaattaggtgggtttccaagtccattaatcaaatttcttttgtaacgtaagaaagatttagatatcatttccgtagtgattttttttttctggtgagagtttcacctccgtttattatttttgtcctttttttctatctcgtggttactttccatatctcctcagtaccttgccatcatcatatcctcgggatgtccctgctgcttgtgttcagttccttgaaggtcttaagaaccttgaaaatttaacttttcaaagtcaaatcagggtttcaaattttgcttacttattttaattgtaactgtactggcaaaattaatcaagctcacaatgaagaaaaaccgatactgcagaatctcagtggaaatgaatacacccttctgggtgcttatttcattctcctgaactttcactgtgttgaaggcatcttttgagattttaaaaatagaaccattgccttgacattgatctctctattgcttctgtagcgtaattgtagtttatacccttctagatgatctgggaaatcatttgagttttctgaaaaactgaaaactagatttgatgctgcatgtgaacatttttggtactacttttcatttatgtattttaaacaactttattctgaaaagtccaaaacatagtgaacaaatacaactgagagaaaatatcttggtgcagaatgacctttttttttttccttttctcaatgtggatatcatttcagtccataatctgtgtattacttatcagatatcatggccagggaagagaacagcataatttttagttgacaaagcacttttatatatttaatctcatttaatctctgcagtgtgcttgtaaagtatcgtaagtgtttttagagatgaggaagctgggcctcagagagaataggtggcatcattaagatcatacagcaaattgtggaattggggtttgaagcaagcctcttgccaaacaaatcagtgaaaacaatgattggtgcatttttattttgaatggtgacctttatattttcagtgttgtttgttgttgttgtttaataagtcttggttaactatattagcagtagtcagagatcacatttgatatcccaagatttttttaagagcatttgctatcaaaatgttcactatcattttacctactaaattttgcagaatgaaattctttgcaacccacctgaccaaagcagagcattctttgtatcagaaatattaaatgggaaaagaggcctattgatgttggtgttgggaataagaaaaggaactccaacacccamccccctcatctcccattatcatctctgtgtaggattctctcacagtccaggcattcttttcctcagaatggatggggccaacaaaggatgcagtgttataggtttctctactgtgctggccccttctcaaggctcccattcttggaggagagaaaagagtgggtttgggttgcaggctggtatcaggagagatctggagtgcaaacatgacagcctagtgtgtccccacacctcagacctgttatcctctctagaggtctaaaagactctgatgtcctcagaatccaggatagcaaggatggaggtgggcttgcaccgttcaacttttaattatacttgcactgtttctgaagctcattttttaagaagctacttacaattttcttgcattgggatgtgttttacattggccacaatgaataaaaaaaaattgtttattttcggatagggggatgagtatatttttaagaaggcattacccaatgagtgtcttctttaaaagtttcaagatcttgctttccacttctttgaatattttttcaccatcttccattgtttgacatccctaatatcaaaacattacctgaaaataatgaaaattttatactttgggagtagttgctccccgagtctgactctggtacattgcttagcttctgttctgccccatctccagcctcacagagccaggctgctttaccggcttaagctggacagtaccacatggagggacatgggaggacaacaagcccctcactacattcttcctgtggtccagtcaaggcatttggtatataattactctaggataagaaatctggcaatactagaaacaaatcagtgtctatccggatcacgatcattaaaataaatgcaaatacttaacatatagcatctgattataggaaatagaatgtatattatccatatttccttattatgctaccttttcccataaaagacttcaaacagatgacttaatcctacaagaagataaaatgattatttttattgtaaggttgtcttttcaaaagacatagaaaattactttatagctataaacaaaattactttatagatatctgttacttaagttgcataggaatggaattattcattctgatatagtgaggggagtgcctatgagtgttgctgatttctggttcagtatttggtcccttattgtgatcattttcttttcaatttgaagatgtcagtttttcccctatacccatagaggtagtccgggattgggcatgtaagcaggttgagcccagatgtcgctccattcctgtcctgccatctagtggagaaatgtgcatgcagtgctggtctacgtacaagacgatgcaatttctaaattcctgtattgagtgaaatggaaggcttattctgtaccttatccacaaatattcataacttacttaagaagtagtagtactggtagtaaatggccattgatgagttaccaaaaaagatgggtccttaaaaatatgctaagtataagagtaacagaatccccaaaatgaaaagtaataaaatctaacattgcaaatataaaaatgtaaaataaaactctttggtattggcacagagatggatagatcattggaacagaatagaattcagaaacagactgtgagggtggcatttcaaataattgagatgatgagatattaaataactaatgttgacaagactggctaaccatttggttaaaaataaagatggatgtcactgttactctttccttcagaataaattctcattggataaaagattaaaacattaaagaaatgatgctgtaaaattatgaaaagaaaatatggaccatttcaaagataatcttgaagtgagaaaagcttgctaataacagtaaacccagaggccatttaaaaaaagacatttatccttccagcaaacaaacaaaaacagttacaagaaaattacaaaaaaataatatctaaagggtaaattctaggttctattctttaaaatgaattaaatattaatgaaatattaaatatcgacagagtcgatatagacaatatgaaaacagactatatagacaatatgaaaacaatttgaatttgtttctctgattattcatgtgaaacaaaggttcttttcatgtttatgccattaagttgtcttctgtgaattgggtgctttctggttttctggtggtgtttgtggttttattccccctattttattttagtgttaatcctttattatgtgtattgtaatatttctgccagtctattaattattttgttgatttttaaaatgtctttttaaaattataattcagtttaacttttaggctgggcgtggtggcttgtgcttgtaatcacagcactttgggaggccaagacgggcagatcacgaggtcaggagatcaagaccatcctggctaacacggtgaaaccccatctctagtaaaaatacaaaaaattagccgggcgtagtgggggcacctgtagtcccagctactcgggaggctgagccaggagaaaggcgtgaacccaggaggtggagcctgcagtaagccgagatcgcaccactgcactccagcctgggtgactgagcgagactctgtctcaaaaaaaaaaaaaaaraaaattataattcaatttaacttttaatcgctctttgacttctactagcggagggatagaacctcatatttttttcttcaatcagtagctgattgtctctgtcatcatgttccattgtccccatttattcagatttccttccttctttgtcctttagaaaagttttcatgttttcttcatgtatatttggtatatttggtatatttctgttaggtttatttgtaggtctttatgaattttgttgctrttataaatgaattatttagtccagttttaaaatttggtatttgaccaggagcagaagatatttgaccaggagtagaagtacttttacttgtaaaaatgttacatttctggagttaggatttgtgtgtgtgtgcgtgtgtgtgtgttgaacacatttaccatggagtttgttttctaagagctgttattaaataaatttgctttttataactgggtcttaaattccaaaaaatcctgtatgtttatatatggctaagatatcctgagggcctcccaaaccactggacgatatcagtattcttatcgtgaagttccaatttcaaagttttgccgtgagttcagcaaatttaagattgcttcaacttctggctcttgcatctgttcatgactccagaaccacctgcttgtcaaccgaatccaaaatccaaccccttcaatgttctcataaagcatccatcacaccaaatgttctgtgaatttaggctgaagattagagatcatggggaggggttacattgagggacagtaaggcatccacttgctcactgtctctgctccagcctttcatctctaactcaggaaataggagtttgcatgtcaccttggttcccactcttccttctaagccaagtggaataatatcttctaaaagtactgagattttttcctgaaggaaacatgatgaatataattttttctactctttcacgtatcagtaaaggctatatatggtgcttacatacaccatgtgtattcatatgattttaccgtgtagcatttatgtttaagtacatctaacttaggactgtacataaaattttaaatcattctgctcttgtttatttcaatctacggataacatttaaattttcagcatcttacatatacttggtaaatgtagcagaatataaaagttttaattcaaaattgatatagtctctatttcttttatatacatatgttctttgacttacagtggggttctgtcgtgataaaactatcataagttgaaaatattttaagtcaaaatgtgtttaatacacctaacataccaacgtcatagcctagcctacctgaaacgtactcagaacacttccattagcctacacttggagaaaatcatctgccaagacagtacacagttgtgttttggccattcaacctcatgattacattgcagagtaagagctacagctcactgtcactgtcccaggcatgtgacaagccttggaaaagatcaaaatgcaaaatttgaagtacagtctctactgaaggagtatcgctttcacagcatcataaagttgaaaaatcataagtcaaggattatctgtatttataaatagagcttcctggaaaatacaatgttttggtaaggttttcttccctaccagataatggtagcctattttacttattcagtagctagaaggatgtacctcctttctgtcatcagtactcggtcatgcagtgacattattcgctaatttttgagagacaaaatgtggtctctctgtcccctgctgagtacaatagagaaagttaatacagatctctttaggtgataaaatgaatagaaaagggaaaaagggaaaggaaggaaaacttaggcttaatgttccattaaatacttaattaaggggtgcagtgatgccattgtgaccatgcttttttttttttttttttttttttgagacagaatctcactctgtcgcccaggctggagtgcagtggcacagtcttggctcattgcaagctccgcctcccaggttctcctgcctcagcctctcgagtagctgggactacaggtgcccgccaccatgcccagctaatttttttttttttgtatttttagcagagacggggtttcaccatgttagccaggatagtctccatctcctgacctcatgatgcgcctgccttggcctcccaaagtgctgggattacaggcgtgagccaccatgcctggccgtgatgatacttcttattgggcagtactccttagctacaaatcacgttatgctacaaagtggtgccaaatgcaaaagcatggctgacacaggcatggcaataactcttcctgagctagagacctgcagggtctatgagatataactgtggcagctcactctacacattatgaacacagaatgggtcaggcttctgctttcatgactgcattatggcataggagtcatcaatgcacagcaagtgtgtcattcttacagtggaattaatgtgttcctcaacgtgccgtggctctatttattttcctatgggaaactgaagctgggtgtctttggcaaagatttattcaaaaggatggcatcattaaaaacaagcttgtgcctatagaacaaaatgaagtaaggatggtatttcttaaaatgaactgctttgattttcaacacaaatcaatcatactggcaaaaatttgtaaatgatacattaacaaatttttgccagtatgattgatttttcatatgtttaatccacatcttttgtttgtgtctgcatacaaatttttttctgaacatgcatcagttgtcatttccaatttttgacctttttctgagattttaagcctttagcaactgattttttaagttgtttttgttacttacagatcttaccaaataaaccacatgtcctcatttcagttagcattatcagatgaaatgttgtaaacaaaagcagttatttagaagaaaatatcatatcstttactttctaattgtttaagaaaattacttaaaaggtttttttttaactgggctgttaataacaccaattataaactacattggtcttcgtaaaacttactgccatgttttgatttacaggatctccaaagatgggtaaatggtgctaatgaacatggctttgtcttggtgtcttttggagctggtgtcaagtatctgtcagaagacattgctaacaaactggcaggagctctggggagattgcctcaaaaagtgatttggaggtaaggtaataatgtagattgtttctttgctattgacaatcaatatctccttgtttagtgcacaggtcccagtaaagcacagcacattgtttccctgacaagattagcaagatgcccttgactttcattttgtttcttagcttgttgaaatctaggaattaattcataaggctctatgatggttaaagaaacctctgacctatatagcacagaaagaagatatgattcagaatgacttttccttgtgtcagatgcatacttacatttccctcagagttctaccctcgtttactcttttattatttattatgattttaaaaattagttttaattgcatgcctttttatatactccttcaaatcagttttgaaatgaggaagaaaatgatggattaacgaatacctaaaataccgtggactcttttgggctcccactttgtctcctttacattatgtttttgatttattttatttaagaaacctggcctttaaaaacacaatcacgtaccatttaacacggtttaagacagaaccatagattgaccccagcttcttttggaaggcattgccagcacatgactgtctttggaatttccagcccaatgctgaaaaatcagacgtgaacactttatttagcgtgtatttattgagcacgtactaccactgttgaactctagggatacaacgtcggtcccatagttactaccatgagtggaagaaagtgccccttaagccattgcaagtaggctttgagtaatagagattttccctttatagcaaatgagtaaggattagctcccacttctcctggctgaactatgcagtgatatttattttattctaactgttcaggacttttcccttcagattcgagtcccattgggtttcctctgttaggcttaaccccagaaagtacctcttctgcttcatttaggacagtttatgtctattccattcagactcttttgtcaccctcttagttgttaagcatatttctgttktatcttttaaagatcaggcaggaaacaacctaattatgtgcttcaccccacaaaacttttatttctggtgaagctaaagaagagaacttactgatttttttcaatacttctgccttccctcagactcagggtgttaaggatttagggatattgactgccatagcagtggcagctctccctgccccttcttgttccagcttctggctgtttgtggggaataacttctagtgtaggtttatttgtttgttgtttgtttgtttgtttgtttttcccatctctgtatgtgtataggcgtgaggaaccaatggaaaatagatctctatgtaagcaaattatttcttgtttttcctccaaccagtgaaagtttttattaaaaagaaacttaatcaaatatttgctgttrccaaagcatggtttcattcttaagaatatcaacaaaagatcatcaaacatttattttaaatctcataatttaatcagagagcccatactatgagtaaggyttgatttttaaaagactaattgtctggtgtacattttaggttttctggacccaaaccaaagaatctaggaaacaacactaaactcatagaatggttaccacaaaatgacctgcttggtaagtcaatgatgtgtggttacttacttggctgttaggttttaattacataaatgtgactttttttttttttttacttcagaggttcatacggtatacggtatgtatgtagtatatggtagagttattatgttttttatccagtatctcaaatcttaaatttgaggccaaaattttaagtctttatttattggaaaacagtttgtaaaatgtaaacctttgggcctctatattaaaatttttagaccagccatcaattttaattatctggaaattatgtacttaatgaactatataaattagtagtgaataagattatacctaattagagtaatcagatgaaagtagaacagttaaaacaataagaatgtagatttaggttacaggtttgttacagatggtctgagaaccaagagaaattagaagttattcatttgtctgaaaccaaagagaagcagaagaccatgggaacagtcaatttattttaactttaactggattatctgctctgtttagtcctaaatcattgggcatttttgaagcattttatattatttaatcttggggattttgattctcaaaattaaaatagtaattagtatatgcgtatcttttaagtgtgttttttaactaaattagttttttaactaaatttaactaaaaaccagtaaagaattttatttatgtatataatttattttcatctagcttattataatactattctataaatgctaaaactaaagaaaaaagaatacaaggcaatttacctttcttgatccttgtatttttttatttttaaatcttttatggctttactgttatgacttagattccttagaagataggaaagaagcaggaagtttaagtgagataacctgactatcaactatttcagtgcgacagtgtgacactgttatgtatgaacatctaaacttttattgtgtgtgggttttccatttcttattgtttttctttttttcttttttttgactgtgaggctctactgcaaggtccatgcctgaaaactctcctcaagtccatagctgctctaggcttctcagtgtgagaactctgactttttcaagattagtatcttttttaacaataggcactatccttgtgagtcctctaatagcttctaactatgatcaaaagattcttccgggatgagaagtaggaaccaaatcaatgtctttcccctcccctcgtagccgcccctcctctttacacagcagctctgctttatttaactgttgggtttggtggtaggttttgttcaaagagaggggtttttgctaaaaataaagtttgaaatccacttctagggcagatcctttagttggacctaagagtcagaaaagccacttgtgggtaagggctagagacactgactaaccaattccaccagtcttcagaatggaagagctctgggagcaccattgagaccatggttcccatacatattaattttgtacctggcacatgtgtattttaaaagatcgacatttcagctagctataatttctttctggccaataacatatatcctaagtacaatgtttttgttttgttttgtttttacaactcttatgccaacttttgatcccttttatagaaatgtaggccatttaccaggagagtaaatctaggttttgaacttccatattaattttgacaaattatcttttttattcccataacaactaaatgttatgtgatgtctcatgtcttacaaatgattataaatgtttacctctacatgtttgagcacataaatgtaaaattaaaccttaaaattgtgaaatattaatgctgatagaacttgaatgttgtgaatagtgattacaacatttctttttggagaagcacacaaactcttcatggacttctggaatccagcccttttttacattttttttaaaaagtgtttttgactttaatattgataaacatttgagtagccagaaagtagatgtctgttttttcactctggtattgtttggcatttcttgctttcattggcttcataataattattggccattwaaatatgtgttgttagtcatgcaatatttgtgttaaaaatagtaatatacatttcaactacttaaaaatggcttttaattgatatatcaaaatctgacaattaggtatataacaaatattttaattggtgtagagcaggaatcagtgaaattacacctttaggaatcctttatctgaaatgcatgtttactgtagtgycgatttttaatgaatttctgggaaaatctcttctgtagagtaataatgttgtaagttgttttctttttcatctttcttcagggcattcaaagattaaagccttcctgagccatggtggtttgaacagtatttttgaaactatrtatcatggtgtgcctgtagtgggaattccactctttggagaccattatgatactatgaccagagtacaggcaaaaggcatggggatattgctagaatggaagacagttactgaaaaagagctctatgaagcactagtgaaggttatcaataatcccaggtaaggtttcaattaacattaaagctgatgaacttacataccacagtatattgtcagtagccaattattttcaatagattgtcaataaattatcaaattatggaaatatcctttagattcctgtgataatgctttgtgcatgttttctattatttagaaaatgaaaacagcagtcatttgaccagccatgttatgacaccagataatattctgcaaggatcttccaaacagggagaaactgcaatgggaacaatctttggatatctacattgtgtcaaatgttatgtgctttatttcattttcatacttataacagctgtatatcacagtttttattatccacattatagaggcaaggcacttgatattcatggaacttgagtaatttggcttacacagcaattgtagttgaaattagaagccaggactgtctgattcccaagacagtgttctttgtactgcatggtaagcctggtgttgctgggtttccctagcactgagtattgcagaaatacggagatttatttactcaggtgaatgatgaagcagaatctttattttgctttttaaattattgatgggtcctgagttaagctagttcaccaatgagtctcaaagggtgaagaactggcctgtgtagttttaaaacaaagcagcagttttcttcatttgtagatattatatttaatttaccttgcatttccaatagcattaaatattagaagcgtataagctttttctttttatgcctaggggatatggcttaacactgagaaacacttgagaaacactgccacattctaaggaacaaccaataataagaaaaattatttcatataaaaggatgcagcttgcatataaaatgctgaattcaactgaagttcattatgctgcctttatgtgagctcaggggtgaccttcatgctctggactcttaaaggatccagtgtcggatacagctctgccattggagcaatgtgttccataactagggttgcctaagtatatcccttcttctgttatctatagtttttctttaaaggtgtgcttttcaaaacatgatgttatttcatatacatatatatatatatgcacacatacatatacatcatgcatgtatcatatatgtgtgtgtatgtatgtatctatcttcaatctttcaggaaagtttgtaaaatatagccctaagtagaattatggggaaacagttgcagaactgctgaaattggctcagatgaaaaggaaagagcaaaaatctaggttattcacaggaagttagtccagctgtgttttgcgaggcatgaaccaggctgaatcagagcaagaacaggttgcaatcttaggtcacatggcaattaaattccagctatagaatattgaagacatgtaagtgcttaatttaaggattattcaatgcagtgaataaatttatatcattcccaaaagtatgcacatcagataatgagttaactgcatgtaacttgaaaaccttaaatatttaactgaaaggattttgtgcatagaaagatgtcttagtcaatgtaaaaatgccagtgatttgtgtagcatgtcctttgctaaaagtcattatataaactgaagtcacttatctttgtttccaatgtgataatattccacatttaacaggtgataattattgaaaatattagtttgcctcactaatattgtgtccgagatattctagtttaaaccaagtaactaatactgtaaaagaagtattccttttatgaagccagcattatcctgatactagaactgggaagagacacacacaaaaaagaaaacttcaggccaatatcgctgatgaacatcaatgtgaaaatcttcaataaaatactggcaaaccgaatccagcagcatgaggcgggtggatcacaaggtcaggagatcgagaccatcctggctaacatggtgaaaccccatctctactaaaaatacaaaaaattagccgggcatggtgatgggcacctgtagtcccagctactggggaggctgaggcaggagaatggcgtgaacctgggaggcggaacttacagtgagccgagattgcaccactgcactccagcctgggtgacagagcaagactctgtctcaaaaaaaaaaaaaaaaaaaaaaaaaagcttatccactatgatcaagttggtttcatccctgggatgcaaggctggttcaacatatgtaaatctataaggtaatctatcacataaacagaaccaaagacaaaaaaacacatgattatctcaatagatgyagaaaagcctttgataaaattcagtatcccttcatgtaaaaaactcttaataaactaggtattgatggaacatatctcaaaacaataagaggtatttatgacaaacctacagccagtatcatactgaatgggcaaaggctggaagcattccctttggaaaccagcacaagacaaggatgccctctctcaccactcctattcaacatagtattgcaagttctggccagggcagtcaggcaagagaaagaaataaagggtattcaaataggaagagaggaagtcaaattgtctctgtttgcagatgacatggttttatatttagaaaaccgcattgtctcagccccaaaattgaactgaaaggaacttcagcaaagtctcaggatacaaaatcactgtgcaaaaatcgcaagcattcttttacaccaacaataggcaagcagagagccaaatcgtgaatgaagtcccattcagcaatcactacaaatagaataaaatacctaggaatacagctatcgggatgtgaaggacctcttcaaggagaactacaaaccactgctcaaggaaatgagaggacacaaacaaattgaaaacattccatcctcatggataggaaaaatgaatattgtgaaaatggctatactgcccaaagtaatttatagattgaatgctattcccatcaaactaccatttacattattcacagaattagagaatactattttaaatttcatatggaatcaaagaagaccccctatagccaagacaatcctaagcaaaaacaaccaaccaaaaacaaaaaaacaaagctggaggcattacgctacctgacttcaaactatactacaagattgcagtaactaaaatagcatggtactggtaccaaaacagacatatagaccaatggagcagaacagagacctcagaaattacaccacacatctacaaccatctgatcttctacaaacctgccaaaaacaagcaatggggaaaggatctcctattcagtaaatggtgctgagaaaactggctagccatatgcagaaaactgaaactggaccccttccttacactttatacaaaaattaactcaagatggattaaagacttaaatgtaaaactccaaaccataaaaaccctagaagaaaacctaagcaataccattcaggacataggcatgggcaaagacttcatgactaaaacaccaaaagcagttgcaacaaaagccaaaattgacaaatgggatttcattaaactaaagtttctgcacagcaaaagaaactatcatcagagtgaaaggcaacctacagaatgggagaaaatttttgcaatctacccatctgacaaaggtctaatatccagaatttacagggaacttaaacatatttacaagaagtaaacaaccccatcaaaaaatgggcaaaggatatgaacagacacttctcaaaagaagacacttatgtggccaacaaacatatgtaaaaaaggttaacatcactgatcatcagagaaatgcaaatcaaaaccacagtgagatatcatctcatgccagtcagaatggtgattattaaaaagtcaggaaacaataggtgctggtgaggctgtggagaaataggaacgctttatgctgttggtgggaatgtaaattagtttagccattgtggaagacagtatggctattcctcaaggatctagaaccagaagtaccatttgacccagcaatcccagtactgggtatatactcaaaggaatataaatcgttctgctataaagacacaagcacacgtatgtttattgcaatacaattataatagcaaacacatagaaccaacccaaatgcccatcagtgatagactggataaataaaatgtggtatatataccatggaatagtatatagcattaaaaaggaaagaggtaacgtcctttccagggacatggatgaagctggaagccatcatcctcagcacataacacaggaacagaaaaccaaatactgcgtgttctcactcataagtgggacttgaacaatgagaacrtatggacacagagagggggaagaacacacaccagggcctgttgggggtagagggtgaggggagggaacttagcggatgrgtcaataggtacagcaaaccaccatggcacatgtatacctatgtaacaaacctgcacattctgcacatgtattccattttcttttagaagaaataacaagaacaacaaaaccccccaaaagtattccttttattaatccacaacttaagtaaaattacacatcttacgtctctgtttcctaatgctttggattcatttaataaaggcctattgcttttttgtttgtttgggaggattcctttgagtctggagcttttattattacaaaataagttagaaagaaagatggagaatcgatcattattaacttcgcacatatccaacctgtggtcaacttttaatagaagatatttatacttttgtaaaatttaatgtacatgtgagccccttacaaggtaattgttttattaaaaggggctttatctaagagatctcttggaataacttagaggtgtctggagtgaccattttaatcacactatttttttgcaatattcatattcttactggaaggaattttgagttgtaaaataaactatgctcatgggacaatgccaytacattaaatttgagaccagtttcagcatggaaaatacctgcccctcaaaaatttatctgtgagttctccaatattcctttccagttgatccatggacctcctctgaacagaatagtcatacaaaatgaaatcggttagttagcaatccagctttataagtctactcctaggtgggactaagagtctgaccgatgaaagtccctgttcagataagctgagtcagatgtcaagagcttttctgataattagtgatctaggaccaagtaaacatattggagttccatatgagttaataatttattcaagagtacaagaagtgagattttccattaaagcatctgtttaatctgtttaatcatcactagagaaagggttatatacacagtgacattaaggtacctgaagacttaagattgtttttatccttcttttccatctttgttaaaataaaagattggattttattttctaagatgtcacgtttcatttttgtattttaaagatactcctttgccccataagcattttctcataaaatggagtagtagaaactttctagtttcccttttgccatcagttagaaattatgataaattacaaagcaactgaggatggccttttaatatttggtgaggtttttgtacttttaatacaactagatttattatttggttgtaattttcttatgaggcattgatgagagagaaaacgtgcctgttaattacatacttttatgtaatagccttcatttgttttttctctcactcctaacaaccttctgttcactgcctctcaatttttttgcataattgttaaaacttaatgtttaggtctagagtgaaatcataaaaaataaaggctcatcaaatcaactcataaatatctgagtagatttttcactgggctttgtaatcttatagctccatcctcacatttctagtggctctctcgacctttcctttcattacatcccaaactgtaatcatttccagcagcatgtcccgtgttctgtgttactgtgtcctgttaattaactctgccatgtgagtcattcaagctggaaacattgcaattacatatgatctctccctttcccttcacatttaatccacacttttaccaactcctgccaactcttctactacaccatttcccttccctttatctgtctaatcccaccaccatttttttagtcagtctctcattggtcattattgaggtctttttaacggactttccatcacgagtatcttccctctgctttaacagcctgtctccctgatataatggctctttggttctaagaaagaagctattatatcttgtcattcagaatacccatggggaagactcatcttcttccaatctaatttctaactaaacttcatactttttccaaatgaatttgttctgggcatattctcagtctcccacttttatgatttagtttacactcttctcttgatttatcaagtcttcacacatgtccaatcttttgttcctctataatgcacaactcagtagtgctatatcctccatgatagattttgtatctcttgaggtggaaattatttcttatgtctaaacaatacaaacttcagtcatgaattcatgcaagggggatttagccgtttgtcaaagattggcacatgaatgtgcagtcacatgtttttaaattaaaataaaatgcttatattttatcactttgtgattccccattttccttggtcttttaatcatttaagagggtgttttctttatacatatatacatgcatacattacctatacatatatactgcatataacatcaaatctgacttcatggtgtttcccaactcttttttatctctttaataatatatcttcaccccatatttaatgttattttaaattaaaacaaaattaaatattattgcttaaaaagtggtagaatgaagttctgtatctttttctccatctttcttttagaatctaataaatttagtttccatcctggttgaaacttgttgatttatactatttaaaagtatgtggagagaagaactacatgtaatgtagtgtggaaacagcatagggtttggagtcagaaaattctgggtctcaactttgtaacataatcaagttagtctccgattttcatttttctcaccaatttaaaatacattttattgggttaacataagataatgtgtttaggccgggcgcggtggctcacgcctgtaatcccagcactttgggaggccgaggcaggcggatcacgaggtcaggagatcgagaccatcccagctaaaacggtgaaaccccgtctctactaaaaatacaaaaaattagccgggcgtagtggcgggcgcctgtagtcccagctacttgggaggctgaggcaggagaatggcgtgaacccgggaggcggagcttgcagtgagccgagatcccgccactgcactccagcctgggcgacagagcgagactccgtctcaaaaaaaaaaaaaaaaaaaaaaaaaaaagataatgtgtttaaagcacttaacacagtgcttgtacatgcaaggtacttactaaagaatagttgttttaattatttcccctttttaaatgaagatatgcataaatatagaactttattataagcatcatcattctgtgttttgtcccctctccatagctaccgtcagagggctcagaagctttcggaaattcacaaggatcaacctggtcaccctgtcaatcgaactatctattggatagattatattattcgtcacaatggagcccatcacctacgtgccgctgtccatcagatctccttttgtcagtattttttactggatattgcctttgtgcttttgcttggtgctgccttgttatactttctcttgtcttgggtgacaaaatttatctacagaaaaatcaaaagtctgtggtctagaaataagcatagcacagttaatggacattaccacaatggaatcctcaatggcaagtacaaaagaaatggccatattaaacatgaaaagaaagtgaaatgagccaacagyccaggtgatagaaataaattggttcactcattgaatttttattgctattatttagtctaacagctactaaaagtaaaacatcagtaaacaattctaacatgcccttatgagatctactaatgaaattctgtggaattaagatggctgtaaaaagcacaaacctaaaatgcagaaatgtattttattcaaatactgatgtagagagttttggcactgaaccttttagaagccttaattatttaaatcaattcagtgactgtgtcagaccttagttttaaatcttgatatgtgcgtgtcccggatcaggaatggtttcatttttcttaataatgtgtgtgtgtgtatgtgtgtgtgtgtgtgtgtgtgtttgtgtgtgtgtgtgtgtgtcctaattaagagaatttttactggctgcttgttacatttgttgagggtacaacacactcaagaataaagtaaaaggatagtcaggatccagatgtttcttttctagcatttaatgtgtgtgaactcagaacactaccatgaaagaacacttccccccaaaactggatgcagaggaagaaaaaaaaaaaagaaatggcacagttttttgtatttttttttttagttattttttgttgttgttgtttgtattgtttytcttttctgatagagtatggccacttctgggggaaaaacatgtaattaagtaaatgtatacattggttttcacgttttacttttgttttcccactaccaataattttcctctggaagaattttatagttttttctatttcattttaatgagtaacaatatgttaaatgcataattaagacaaagcaatgaaattctgactttattcaaagtactgaagattattgcttctagggcatttttaaacagcaccattgtattgttgaatgtttatgtaactgatggcttttctataatgtaatttttgaatgttcaggtgttacatttccaaagtttaacttttaaaaaaccatcttctgatcccttttattgtctgggccatacaatctatattacataggtgccaacatttaattcttttaaatggaacatttgcagttttccatattggtacctgctttttctggagaggtttgagatcttgttaacaaatcagactttacactatatacagatgtgacagataaattgaaccacttgtttgtgaaaatgagttcctgtcatcttcctcattcactcagccctcaccccagcagccttttccggtcattgtagctgacatggagcagtgacagtattcatttgagaacagggatgcaagtcacagacatcataaaatcagggtctccctgctgaagcattcactagttggcaactatgaatttattccatgtcattctgtttacttagcacttgcactacccttgttggttgagtgtatgctttatttgtttctagtttgaaatcccayatctgatagctgagagtaggcaaatacaacatttacctaatgtcattcactaacatggaagagttgtgaaaattctagagtgctgtaaatccttggcatacactatgacaaacaacttcattactctcccaccaggagctgctctcctgcacttagaaataatgtcacaagtagttttctaatgtacaatgcagacaaatgtactgctctctgaatacttgaagaaatggtattatacatacatagaaacttattagttataccttttcacaatcttattacgatgttgccgttaaaagggaaaaaagacacaggcaatgaatggtgggatagtaagaggacttagagtgtatgaatgagttgattttacttttttggaatttgattaagttgacagtaggcactgattggatgattaaacataagttaatctccactgtgataaaaacttaaataataaacatgatttaaaatagagaagtgttgttggaataaaatttttattcagattttatttcataatattatatatattcattttaaacatgtttctaagacaggtctcccaacttttgtatgtatttatgagtgtggaaacacgtgttaaatgtgagacttttttttttattgttaaacagagggagttaccttacaaggacatcgacatggatcttaaaattctgttccagaattcagaatgttaagtgtaggtatttactgatcattgttgtttttttttttttctagtaagattattgttagacagttttggtaaatagggtgatttttaaattttccacacttgggctagattctataataaagttttcaagaaagtatttattcatttattatttagaaagagtttctgcaactattaaaatattcccataactggttatcatcatgtcaaacacaaatgagaattaagacatttttcctctagagtggcagcttctaatatccctccacatacacataggggcaggatttggatgtccagggttgaaaagagctaatgtttgggttaaagtaatagtttatgattgaagctagagattctcttcaaaactcagctacttacttagtcccaagtgctactaaaactgaacgactccacttcaaaaataaaaggtttataaatgaaagaaccaaaataagttgaagaaaaacctcaagggataatccaacaatctgttttactgaaagtataattcatatttcattctagcttctaagtaattcaaccagcttgtaaatattaaatcacattaaagaatggttatttgcagttgatataatcaaaaacagtctgaaatagaaaaattttacatttcatatgatgaagtttgagaattataggagtcctattattgaaacttctccaaaatatgcattaaagagctgcttatcatgcttccaagatggtaacattttagccagcttttgaagacatgtatttcatgtgaagatactattgatatttttgacagcaaaaacatttttccaacaaatttaattagaagggtcttagatgtccacacaattaaagtattcatattgtcatttttctacaagtcctgcaaagtgttaaaaatccccgatcacttgggtgtttgggttgctgagttggggttagcagggcaggtaaggagtattggtaccaagactcctaacttttaaaatatggaaaccaaaggcacacaatacttttatgactcatatcttcacttttgggtaaggcagacatgatgtaagagagaattcatttatattgtatcctgcaagattagtgatcttccttattatacataaaaccagcagattattttcaatagagtagtatataatccaagttcagactctgaaaaatcagaactacttgtagaattatgttattcaaataaaacaattataataatgtccatctactcaaagaagtccaacatcaacattaatctcaggtaatatattatctcaggtttttcatttattaaccaataaaatctgaagttcttgctgaattttatagaattgaaagcattttatttctgtgttagtttctatctataattagttttacttttcagtaaccctattttgtgcagtgattattccatattcctgagagcagaggtgaccagttccactgtgtcaatttaatatttacttacttaattaatttatttggagacagaggctcgctcagtagcccaggctggagcgcagtggcacaatcccagctcactgcaacctccgcctcccgggttcaagcaattctcctgcctcggtctcccgagtagctgggattacaggcatgtgctaccacgcccagctaatttttgtatttttagtagaaaaaacaaatgctaaagacatatattaagttgaacaaaaatatgtattattaatagcatttatatatatttatatgtgtagttagcatttaaattatcctcgtaattctttcgaaatttgatttttaaaaaatttaaaatggtctctcaatttttttaaaagaatgacagtattatgaactttttgaagtcttttaagaaacaaaaactatcttttttaaactaaataaaattcaaaaggactagtaagtttagaaacttggtcagatgtaccctctgtaacacttcttactaaaatattaggaataaataggatgaaattgttacaaaataaaatcaagtcactgctttgaatgtattctttcttgtacttccatcttcttactctaaaatggaaaacattttgagatttagcaatttaaactacacttatagtataaataacatttttcttacaactgacaaatgacttctcatttgcaatctcaaagatgaaggcaagaaagaaatttactttgggtacctctgaataaattttatgaatccaagagaatggtacaccagttgcaccatttgagaaagtgcaattaatttcgagtttgaatatgccatactccaggtccagatttcatactactgacatgacacaaccttccttacctgttctctcccatcttcttgcttccaagctttcagtttcctctcttgggttttctattacccttaggtattttccaagctgccctatccttttcaagtttatggtgcatagattgtgcctgtctatctaatgtgtatctaatgattttttttttttttttttttttttttgagacagagtctcactctgttacccgggctggagggcacaatctcagctcactgcaacctcctccctcccaggttcaagtgattttcctgcctcagcctcctgagtagctgggactacagacatgcaccaccacgcccagctaatttttgtatttttagtagagatggggtttcaccatgttggccaggcccaggctcttctcaaattcctcacctccagtgatctacctgcctcagcctcccaaagtgctgggattaccgctgtgaaccaccatgcccagccagatgcctttgttttttaacaacgtggaaataaaataaattccaacactgtaatttacaaaggcgaactaagaaaatatctagctgtttttttaaaaaaatgtttgatctgtactagatgaatgccatttaggatgtaagatcaaaaacagtggatgtgcatatggtgcttcttatgggtattgggaggagggctaccactgaatgagtttgcactccctcagggcactgtgtgacgctctggatatggcactgaatgaactgtttggggcatagctcaatgatcactaaactatcaagccacatacaatcttcttatccccaacttggtcagctaaaatttttagacaactaccttgtacagatagagacgttggttttcccctgtggaagcctgtctcaaacattcattcttggtgctcctaacaggatccttttgtaccagaaaatgagtactgtctctggttctgtaacatcactcatatctctaatgttaaaatgtgctagaactgcagccacctgtctgctagagcacgagaaaagcccaagacagagaggtggcaggtactcaaaaatgtatctgaagctaggattgcagcagtaattgtctttcctgtaacaatgaacagaaaggtgtggatagcaaaggcaaggacgacctgggaaggaagcagcagtgagtggttacagatcaaacactacccagaattcctctcatacttttcaaaatgtatttttattccacctggtatatttcagtgatgttctggggaagcttatctgaattggataggtgggtccctcaactatgcaatctatgttttggaatggtcatccatcttttttaaaattattatttcatcagagataaggtgggaaggagcaaaaatcaagcaaagacctttaaaggtcttgaatgtaagacataaagatgtcagtggaatttggcaagtgcaagactttggcaatatctaggcatctataggcatatgggccacattatgtcatacatgttctattgatgcagatttcaagataaatgggtgtcctacctgagaatgtggctataccactggaagtgtaggtggcatcaactcacatgtttgtgcatatcaagacagaaggtgcagaacatctctctgctggctatcatttcttatatcagaggtaaatgacagaaatttaaatattttttgttctccaatcataaataaatttagcattaggtgacatggaattttattttatagttgtgtgttctatttatctaccagctttcagatgccaggtctagtatgtttgctgttcctcactggttaagaaactgcccctagatatgtacagtaaatctgttcaaattacaacatattctgtgaaaactaaatagaaaaaaagcagatgggggaaatagtacaattttaaaaggtattttagattccttaaaatttcatccaatttatgttgctttaatttcttatttctgttaaatgagtagtagccttacatcaccactttataatactcaggctttaaagtttaacagtattggctgggcgtggtggctcacgcctgtaatcccagcactttgggaggccgaggcaggcagatcacaaggtcaggagatcgagaccatcctggctaacatggtgaaaccccgtctctactaaaaaaatacaaaaagaaattagctgggcgtggtcgcggacacctgtagtcccagctactcgggaggctgagacaggagaatggcgtgaacccaggaggcagagtttgcagtgagccaagatcgcaccactgcactccagcctgggcaacagagtaagactccgtctcaaaaaaaaaaaaagtttaacagtattaagagtgtcatcctaaaatcctattatcaagtacaaaaggagactaaataatgtgcctttccatagcctgcaaataaataacccatttattcgtgcaattaagcaatgattgtcagtttttaaaactctaattatccttgtgtatggcttgagatgccatgtttattgctacttttcaggtttttctataaacttttgttttggatttcaattataaactaacaattgaaaatgtgggttgcctgttaattttgggctgtaatgcagaacattgttcaagactatttgtcacttgaccattattgatattccggcccttgaatcctcttaccagtcagcccaaatgctcttattagttccaagtaggagtacatcttgttattatcagcatcaaatagctccagttgttcttgttggggtgtctctgctcctagagggctctggatttcactgtaagttaaataaccatttgctttgttgtcagcccatagaaaaagacttgaaggtctatgaaaataaaaaagtttggtatatttcaactcaaattttcaatgttaacccaaacatctacacctttcagaacagcattttgtcctcctggggctggtcttctttccggtcctcaaacatacctagatcattttttgcttccaccttggctttcattgcacatcactttaccacttcagttgctcctttcctttctttcaacatccagtttacctcttttcttcattctacttgaactatctgatcatttactttaataatttttcttctgtgatctgtatcctcatgatgttttatatctaatctagtgttttcgttttctgtttgcctcattccttaacataagcactgtaatggaatattcttcttcactggtagtctagtttttgatatattcattggatcttctttctctcctaaaactgtttaaaaacttccatctggctacattttaatggcctttttatcacagtctttgcagttcccttgtttacattcatttgctaccttctgtctaatatttcttaatattacatcaaaagatacctacttatttggctaacaattctgaacatactgatatctcttacactcctaagttagtaaaatttattagtttatacaaaatcatatgtttcttca

SEQ ID NO: 95834 - DNA, 149488 bp, Homo sapiens
  misc_feature (1)...(149488): n = A,T,C or G
gaaagtatgctgggtgtggtggctcacacctgtaatcccaccactttgggaggccgaggcaggtggatcactcgaggtcaggagttcgagaccagcctcacaaacatggtgaaaccccatctctactaaaaaaatataaaattagccggtgtggtggcacatacctgtaatcctagctacttgggaggctgaggcaggggaatcgcttgaacccgggaagcagaggttgcagtgagccaggatcacgccattgcactccatcctgggcaacaagagtgaaactccgtctcagaaaaagaaaagaaaagaaaaaagataatgaaagatgtagtgcattgctcaatagtatttatgaacattaacatgtttggatatgttttatgaaacagaaacaaaagaatatagttaattcatttgattatatgttcatattgaatttgcatgttgagggccacatagtaagtaaaataactctgaatataaattgggttgtatgataataataattggcaaaatcaacagatatttatttcatggtaattaaatttattcaataaccttttgtaatccatatttacaaggatcttgcaatccaattacaagataattgttgaccacagtcaaaggtagacatatagaactggaaaacacacaattgttgctactggattataattgcttctaggccccctcagatgacagagcaaagagacatgtgtatactaacctgtgtctatatacacattgataaatatttctatatgtaaccatctgtatctatattaagttaagcatgagttcatactgatgtctccaactttaatccatttaaataaatgcaataatatgtacttagatttgctcttatcttaggacacaactcaattatcttaccggtgttttgtgttccaaaatttttaaaactgcctagaacaaagacttgtcatgccatccaaatcttatggctaagtgactaagttctggccagtgggaaggacaattgtggggtgggacttatagggaggcttctgaaaatgagaacagtttgctgacacacctctttcctttacttttccctccttttctttcctcttgcctggaactcagacaagatggttggaccactagcagctatctttgatcatgaagtaattatgaggttagaaaatcattttagacagtaaaacaaaatgagaagtttggaattttgacaactcagagctgtcaaactggccctggttctgcctacatccacactacttttatgagaggaaaaaccaaattgttatcatttggactttgttttatccaaccaaacctgatgctgatagtttttgaaagtgactttaaatgtagtttcttaatcaaactggattgtttttatgactgcttatatattattcagaaaaagacttcttgaggaaagtcactttgagttgagtcctaacaagtggggagtgtagaagcagtattagaatgtgtggaaaagagaaaggaaggaaagaagaaaagcagagaacctgaggaactcagagtgctctgggaaagggaaagagtactgcattgtcagggaggggagtacagagagaatgatatcttaggaataggcgtaaaaatgattagatagtgtgggtattgttgggaaagtcttattcctcttcttcccagattctgagattctgatgacaggaatgttagattttttttttttgagacggagtttcactcttgttgtccaggctggagtgcagtaacgcgatctcggctcactgcaacctcctgctcccaggttcaatcgattctcctgcctcagcctcctgagtagctgggattacaggcgcccaccaccatgcccagctgatttttgtattttaggtagacacgaggtttcaccatgttggccaggctggtcttgaactcctgacctcaggtgatccacctgcttgggcctcccaaagtgggattacaggcgtgggccaccacacccagctgaatgttagatcttttgttaagagtcacaacacatgcccctgagcttcgtggctttttttttttgagacggagtctcgctctgtcgcccaggctggagtgcagtggcacaatctcggctcactgcaagctccacctcctgggttcacgccattctcctgcctcagcctcccgagtagctgggactacaggcgcccgccaccacacctggctaatttttttgtatttttagtagagacggggtttcaccgtattagccaggatggtctcgatctcctgaccacgtgatccgcccgccttggcctcccaaagtgctgggattacaggcttgagccacctcgcccagcgcttcgtagctttttaaatcccagtctagtttctctctgtttagattagatagtttctactgttctatcttctagctcagtgattcttttctttattctgctgttgagttaaaaaattgtatttcttgcattttttcagttttaaaatttccatttatttcttctttatatgttgtttctttgctgagatttctttttatttaattcaagcatgttttattgttttattttactttttgagaaggagtctcactctgccatccaggctggagtgcagtggcgtgatagctcactgcaacctccgcctcctgggttcaagtgattctcctgcctcagcctcctgagctgctgggattacaggtgcccaccaccacacctgggtaatttttgtatttttttggaagagatggggttttaccatgttggccaggctgatcttgaactcctcacctcaagtgatctgccagcctcggcctcccaaagtgctaagattacaggtgtgagccaccatgcctggcctcaagcatgttttaattgcttcttgaaatattttctgatggatgctttcaaatctttgttagataattttaacttgtcatctcagtgttggcatctattgtcttttttattcagcttgaaatcttcctgggttttggaatcatgagtcattttttaattgaaatttggtatcatgagtgattttttgttgaaatctggacatttgggtattatgatattttggatattatttaaaccttttattttaactagtttttcttgacactgctctggcagggggcatcaacttgtaaatggcaactggtagtagaagtctaggttccttattccacctctgttgacaccaagggtgggtggttccttgttactgctgggcaatggtgggagtttcagctccccactagttgtccactgatacttccctagttgagagggcttggaatggctccttactgcccccatgtagcctccagtgacaccatggaggggaaggggtgtgacatccttaccattgggcagtgatgaaagctctgactctccaatacacctccaattacaccatctaagcagggaaagggaggggtacctcaccactgtaaggtaggagtggaaatccagggtcgccctgtggtttccagtgacactgagagtagggaaggatgtgtgtggaggattacttgttactgcccagttgaagatgaaaatcccattcctctctttggttttctctgacatcaccttagaggggttgaggagtagagcgattggggtgttaggatgctggggtgtctcatcacaacctggagagtgtggaagtctaggctcccaactcagcctttgctttatggggtggggtcagtgtgtgtatgtatgtgtgtattgtttgtctacagtggagtgattatcttctaaatgtttcctttcttgctaggccactcctttttcatcacttggctagaaagagcagccttttattggggcactttttgtctatctatgcttcctggcattttggggtttctggttttggcttctccagcacccagtttggggtatataaggctacatgaaaacccaaggaacttcccaccgtgttgctctctggaccctagccagtgtgacttctctccacctttcaaagtctccctatgtttatcttatatataatgttgagtttttagttgtacttagaagaatagggagaaacctatctactccatcttcctggaagcggaagtcaggggccactataaggcattgaaacaattacaaacaaaaatgcgtggcaaagactcagggaggagttgcagtgcctttcaaacaagggcatcaggagggcaatcaaatgaagaaagctaaccagccataggcaggaactgcatttgccagtacaataatatctgcaagcaccttcaaacagtaagaattacttaaaaattcataacgcttctttaaaatcatggaaacctatgaaaattccttagtttatgaatcaatgtagggcttcttggaggagacattgttggagaagacaatgcagggcttcttggaggagacacagttgaaaaaccaattgcagttcaggagttaattatagaaacctgtagtgctggaggaagaaaaagaaaaagaaacctgtaggcccacatttgttgcctgcaggagatctattccagctaaaacctgacgaaaccaggaagagaggcacaggtgggaaatgctccagaaactaatttacccctagtaggggtggggacccaaatctaggagaaggtctaattgttgaaatgagttttttctccctccctcccttcgtccctttccttccttcttttcatttagtgttgggtagagggttggggtggagtgatggtcaaagaagggcattaacttcctcccagttacagatagggaccttgcactgtgtacaagtttttaagtttttggaaacgttgccagcatgcccagaaacatgaaaagagcccagatggaaatgatccaattcctttgctttcaactccatgggttactgagttgaaaaaaaggtcaaagtcaaattttgttgattgtgctacttagattggggttcgcatttccctagctactccatacacattctctttcctgctgtattgccattctccaaaggctatagtcttgctttggtgtggtcatggcttccaaccctttggtggagtcagtggagatgagaaggcctgcaattacccccaaggggtttacagactcaaatatgtacactaagcattgacagaagaatgactaaatgtctgtctctctgcaccgcgcagtggctcacgcctgtaataaccagcactttgggaggccgaggcgggcggatcacttgacgccaggagtttgagaccagcctaggcaaaatggcgacaccccgcctctactcaaagtgccaaaaaaattagccgggtgtggtggcgcacgcaggcctatagtcccacctcacctactccggaggctgaagcaggagaatcacttgaacccgggaggcggagattgcagtgagccgagatcgcgccactgcactccagcctgggtgacagagagactccgtctccaaaaaaaaaaaaggtctttctaatacacatacatatactactactttctggattttatatttagttttgcttacaaaatggatttagggtgtagaattttcaaagattagagaaatatgccttgaaatagaaagtgcaagtttctagtaactcttcccttcaaagataatgttaccaacttcttttcctactatttttagtattgagaaactgttgtgttaagtaaaatcaaatgaatttaaaagttattacacacatggtagctttctgagtgtttttcaagctgcgagtcagttttgtcctttttaacacgcagcggttgtggggacaaggtttccgaggaggcgggagcgagcgacggcccccgcctcccacacgccctctgctttggtaaacaaggagactcycgcccgcaggctgtaaatgaggcacgagcttgggggcagcgccagggcgcctggcgtcactgttcaaaaaggcctcttattggtccttcgcacagctgcggacctgggaattctgattggtctgcttccctgtccgtaaagggattgacaggccctgccgcgtcaggccgctcctctcggctccgcgctccttycctcgcgcgtgggyacccgcccccgagcggtgagagcgcgtgcgcgcgcgcccttctcygtgggcgagccagccagtcccgctgcacacgctcgcagtctgtgggccctccgggaggcggcggaggtcaccgcggggagaggggcgggcgcagcatggcagcctccttacgkctcctcggagctgcctccggtctccggtactggagccggcggctgcggccggcagccggcagctttgcagcgggtaaggacctcacgcctcctcccccttgtccttctttcggccgctcgcttcttctgtccagacggccgaagaagtcttttctcgggaggccctgcggttgggctggggcttaaaaaacaatattttggctggtactaaaggcctgtccttttctgcggccgccactcactccgcgagtacccccctctgccttccctccctttctcccgggctcctgatgaacgggttcagcgcccttttcgggatttaggaagaggtggggaagagcttgggctgaagagaagagagtatttgggaccccggcatgctgctttggagttaggactccgaggacgtttggagcgcccaactccaggagcaacccgcactcaccccagcgacccctggtctttcagcgcccccagggtgcaccttgggttggggacacacttgggcagcagggcctgatgtttaacyacctgagtccgaggggatggccttattacacaagcggtggctgtacaagccaggcagtaagtctttcagcaaagtttcagtcacccttgaccagcaagacgggcttcccccctctactgtaacctaaaaaaatgtcatttttgtcaaattatgaaccaaaacacgttcagcgtcctcaagattgtgggcagaattaatcctgcctccctcctctcataccatggtaaattgtggaagctagccatgaacttacaaagaggcagtttttagagccaggatgaagatccacggagatctaatacagtctttcatactccgcacgagggacatgaggccccttggatgagtgaatcaggatattcccagcaagacctagaaagttgttatcagttgttcctaattccttaactttctatcacaccaggactcctctttaattgaaaaattggttgatttgtgggggcactgccgttgtcttcctcaaactgaaagtttgagagttgtaacaatgcatcgtttagcaagatcatactgaggattaataacaaaaaaaaccttggcattaattttttctaatctttgcttaaaaaaaaaatagtgggttaggatttgagccccttggccccccgccctttttttttttttttttttttttgagacagggtctctgtcgcccaggctggagtgcagtggcccagtcacactgctcactgcagtctcgacctcctgggctcaggtgatcctcccacctcagcctcccgagtagctgggattacaggcatgtgccaccacgcccgtccaatttttgtatttttagtagggacggagtttcgccatgttgcccaggctggtcttgaactcctgcgctcaagtgatcctcccaaagcgttgggattataggcatgaaccactgtggctggccaggaattgtaagaactttctcttacaattcttaacagcttcccattctccccctcagtgaaacctctgaatttcctttctggctggagaagaacagaggctcggtgagatgcaagagaccagatgtctgatacagaaccacagtaacaagataaaaactcagaatatgccaaacttgaatgtaaccactgtttgagcttcatatattgagctacaaaaatgcttccgacttttgagataaccctaaaagaatagacacttttccacagtagcaccagttttcacatgaattcacaattctttcagttcccattagccaaggaagacatatttgctgtttagtggttttacaaggtgttctaatggtattttaatgaacccttgatgtaccttttagagttatgaaagttcttaccaattcatggtgaaagagcctgaggcctaagactgtaatacrtgcctctgtaaactgggagggcctacctcagagtgctgattagactactttggcatatggtcttgtactttgggttctttggcccaaaggtarttgtcagaatatagatttctgataaattttaaatagttcttttgtgatgaagtggttaaatcacttaagcaatttttttttctcttgaaaaaaattttttttttttccctcggagtctttgtctgtcgcccaggctagagtgcattggcgcaatctcagctcactgcaagctccgcctcccaggttcacgccattctcctgcctcagcctccggagtacctgggactacaggcgcctgccaccacgcccggctagttttttggtattttttagtagaaacggggtttcaccatgttagccaggatggtctctatcacttgacctcgtgatccgcccgccttggcctcccagagtgctgggattacaggcgtgagccactgtgcccggcctttctttggaattgttttaaacatttaaatttctgttaattttagtttactgcaaaagtgttaacttttctgacattagattcttaaagagtagaaaaaaatctgcctgcaagtttggagtcaaatgacattaagaaaaagaaccatgttcagatagtaatgtgtgatgttctgaattctgttggatatttgtagtatgtttaagatgtttatatcatatgaatgataatattataaggagctatataatttactgtttaaaaaaatgaaacctgaaagttgccggttagtagcacatctttttaacttttttataaatacattttagagacaggtctccccgtgttgtccaggcaggagtacaatggcacctacttagctcactgcaaccttgaactcctgtactcaagtgatcttccgcctcagcttcccaagtagttaggattgcagggtgcaccacgatacctagctaatttaaaaaaaaatgttttttgagacaaggctagttgcctactacgctggtctagaactactggcgtgaagccatcctcttgccttgacctcccaaagtgttgggcttacaggcattagccactgtgcccagcctgccacatcttaatttttaaatgtttgtttgtttgtttgtttgtttatttgagatggggtctctctctctctcttgtccaggctggagtgcagtggtgcaatcatggctcattgcagcctcaacctcgtgggctcaagcaatccccctgcctcagcctcccaagtagctgggaccacaggtgcacaccaccacacctggctttatttatttatttatttwttttgtagagatggggtctcaccatgttgcccagcctggtcttgaactctgggggtcaactgatcctcctgcctcagcctcccaaagtactgggattacagtcatgagccactgtgcctaagcctaattttaaaatacttaaagcattgaaaaggaaatagaagaatgagaaatgttaaagtgtacatgtattactatttcatcacctgtttgataaaattgtgtatgttattttagaaggtaattaagtttagtttcagacttatttgtacagagaagaaaatctacagctataggccctctacaaaatgtcacgttgtgactctacagcttgtacatggaaaaataaatcacatcagatcatcttgaggtgaccacctgaccaaaggtagaatggaaaaattagcatcatgtatagaaacaggaatacaatttttaatattattggtcctttttgtatatgtgaaatttactttcaaagtagcataactcattggataaatcaaatatataatggcagtttttccctttacattagcttctagggctgcacatgaagttctgaaaagctgctcatggtccggggcctaaaagttgaccctaaacttgtgaaattacataaggagcgtatttattactaaaataagttgactgaaaccgtaaaggcctttatagagaaagtcgtcacccttagtttagtaactgttaatagtaaagcagatagagtgcttatgacgtagtattatgtgataaaatagatataaaaaatgtattatgtgataaaatagacatacattgtatagaaaatataaccttatgatataatgaaaaatgcagtcaaaagactgaaagtccatgcaaaatgttttttttatttttgtgtaatgagattgcttccccttacaactgtatactttttcattctagttttctacaatgaaaatgcattactttgaatagaaaagaagcctcagaaatgtaaaataattaacttgttaccaatttttgcattttgacacttagtgaaacctgctttttgatagcacttaaggttatcaagatacggataactccccttgttacattggagaaagaggtcataatcggtaaatttgcatctataaatttagaaacaaactttgccaagttttctggctagtttcttttcattcgtcctcagtaatagacactaatgctagtttcttaaccagtgaaccagtatcacctttgtatttkgttgattgattttctcccagcttggttttatttatgttttaactctactttttccacgcactactgtcagaagttatttaaagagagatgcattatttaggtttgagagtttttagggcaataatcattccattatactcatggatttctgcccctttgggtgcaaattattttatatttgccaagcgcttattcaggtgtttcaccttaactaaaagctttctttccccagatacagggcttctcctacagtcatctatacttttttctatctctttggctcttgtaacccactaggcaaaaaggggcagttggcataggacttgacctgtactgctacaacttgaccatttttggtaagagtaactaatacttattatcaatcgtgtgccaggcactgtttaacgctttatatgcatcatctcaagtaatctttacaataatcttctgaagtaggtacttttattgatcaaatgttgtctagagaagttaagtaacttgtaacttcaatggtatacatctaagaagtgaacttatcaggataggaacctaggccttcccaactcagagaaaattttaaacattatcaccatcaatagataacttattctcttttgacatcaggtcatctaattatactggcctttctttaactttgccacagagaaagatgaaataaagagagctgagtcctttgaaaactttatcttcattcacattcatgttggcccatccaacatggcctcattgttcttaacttcttcagcttcagtaacatcagcactctacttcagtttttctaggatcttagtagtaggagtgattctcttgctgagatttcaccagcagaactagtctctggttgatttaacctcctctgtgattcttgttctaacaaacatactgttacataatgctcatcacctggtcctttgactccctcccttttcctccaagtacatagacatgctttcttgtttcctcatttcgtaaggtctctctctaggtttgtctgtacccattctcaaacttatttataattaggaatttcactgatgcctaatactgtttttttcagcctcttgttgtatttctggataaatccatttttgtggtctgtttgtgcctttccccagctgtcacttagcttggtgatatggagagtcacagaagtttgctgattagatacaatgctttcattaatctcttgtttattccccattacattttcagattttccacagcatttccagaactttaacttagggctggcagctcctgaaccartcatttggcagaaggatgccattaccatgtattagtttagacagtttgaaacttgacctcggatctacgggaaagaatattggagagtcaacctgcaatgtgtaatggttgctgtgacactgtttacctttacacagtccacttttatcagcagcattactttgtaattgctttagaactggcttttattcccatatgcccatttgatgaaacttacctagtttattattcattcacatarcatatattaaatttcactgtgccacttcatttatttcattttattataaaagtagttacaaaagttacatgctcatggtaaaaaatgggaaaggttataaaattaaaagtaaaattttcttcaactccgacccagtagtccaactctccaggtgtaagtactgtttcgtgtgtatccatacagaaaatcagaaaaattaatgcatatgtatcattttttcttctcttatactgtatcctatagataatgctcagcattttttttccacttaataacttatcctggagattttttcctataattttagataaatgtcacctttttttaaacatttgcacatttcattgtgttgatttactgtgaattatcaagtgtcctacaatgtacatttagttatgaattaagtgccctattaatatataattagttatgaatgaagtgccttattaatacatagttatttgcagttttttggctgttacaagtagtgctgtaataaactatatctttgtgttgttcagaatttaatacatagtagggattgctatggcccatagttgggcaccttgtttgtaaataaaattgtattggaacacagccatacccatttgtttgtatgttgtctatggctgctttcaaactagagtagatgaatgaaatggttgtaacaccatttcacaatggctcacaaagctgaaaataatttactgcctgactctttaagacaaagttggctggcccctcatgtgtagtatatattcttagaaatggaattgctaggtcaaagagtatgcatgttttaaatttaaattctaaataaaagttcaaatttttttttgccaaattaccatccaaaaggtcgacctaatatacaatttgacagtatatgagagcatatgttttcatcagttatttcttaccaagagtagtttttatcaaagaaaaaacttatccaacaggtgaaaaatggtatcacatcattttgttttgcatttctctaattatgacaagttgggtatatttttagaggttttctgggggggtaatttacatattttctgttgtcattttgtgatttttgcctactttaaaaaattattcatgtttttcttccagattgtaaagttattttacatataaaacaaagtagctctatttttgtcatgtgttagagtgtttttcttatttgtattttatctgtttgtgatattttttccatatagatatgctaatctttttccccttgttttattatgaaaaatatgaagcagaaagtattgaaagaataatataactgacatccatatactctttccttagaaacaagttgttaatattttgccacattgactttttttcttccacatatatacctatcccgcttgaatcatttgaaagtaaattgctgacatgacactttaaccctaatgcttcagcatgaatctaagaatgaggatattctcctatgtaaccaaactaccattatcctacctaagccaattagcagtgattccatggtatcatctaatgtacaatttgcattcaaaatttcattattttcttaaaggctagcttttttttaaagtcaggatccattcagacttcacactttacatttgatctatcactttagtactaattgagaactgtcttctcttgtttgtttctatatatatgatactgactttttaaaaacagctttattagcaatatagtgatatatgataagttgtacataaagtatacagtttgattagttttgatgtatataagccggtgaagctatcatcacagtcaagagagtgtggctgggtgcggtggctcacgcctgcgctcctagaactttaggaggctgaggcccactgattgcttgagctcaggagttcgagactggtctggccaacatgatgaaacctcatctctacaaaaaaatgcaaaaattagccaggactggtggcatgtgcctgtagtcccagctacttgggaagctgaagtgggatcatctgagcttgggaagttgaggctgtagcgagctgtgatcatgccactgcactctagcctgggcgacagagtgagaccctgtccaaaaaaaaaaacacaaaaaaatggtaaacatatccatcaccatacccctgagattgattcatacctctggaatatacaaatatttgtatatttttcttggttatagatktctagcttgacagttgttttttccttctggtatttaaaaaatgttgcaccactgtcttctcacttgcattgtttctgatgagaaatctgcctttatccttatctttttccctttctacatagtgtgtcctttttcctgtggctgctcttgtgcgtttgattgtgatgcatcttaatatggttttcttcatgtttcttgtattggggttcatagagttccttggatgcatggggtttgtagttttcatcaactttggaacatttttggccatttgttcttcacacatattttctgccccacttctctcttctcatttgaggactctagttacatatgtgtttgggtggttgaagctgtctcacagcttattgatgctctctttattttttaaattatttttttctttgtgttttgaatagtttctattgctgtatcttcaaggttattaatctttcctttggtatctactcttcagttaatcttctggtataattttcatctcacatattttagtagtagatttcatctcaagaaatttaatttgtattgataaaaatatctttcataattctacctttggaatatatagactacagttataatttttaacgtccttgttttctaattctaacatctgtttcagcttagggttggttttgactttttgacttttgagtatacacgttcccttgggcttcagagaggttcaactttggccttcagcctcttcatactcatctggtgattttattaacttttacaaatttcacctcttaacttttgagacaaatggctaccaggtatatctcttttttctcatcctatcactgaaaccttggtcatggtatttcttttttttttttgagacagagtctcacattgtcgcccaggctggagtgcagtggcgcgatctcggctcactgcaagctccgcctcccaggttcatgccattctcctgcctcagcctcccgagtagctgggactacaggcgcctgccactacacccggctaattttttttgtatttttagtagagacggggtttcaccatgttagccacgatggtctcgatctcctgacctcgtgatccgcccgtctcggcctcccaaagtgctggcattacaggcgtgagccaccacgcccggccggtcatggtatttctaatagtctgttggacatcttttcagctcattgacagttcatagttaccctgggtaaaactgagccagctctccttgatttcttcacttaggtattgataacactattctcttactgtcattttggacctcacccttattttagcctataatccaatccattgttatatccttttacttctgtctttgaaatagtttttatacctgtcttttcctgtggctaccacactttattaattttgactttgttatggactgaaattttatgtccccacaaaatttatatgttgaattcctttttttttcttttttgagacggagtctcgctctgtcacccaggctggagtgcagtggtgcgatcttggctcgctgcatcctccaccccctatgttcaagcaatcctcctgcctcaccctcctgagtaactgggattacaagcacatgccaccatgcctggataatttttgtatttttagtaaagactgggtttcaccatgttggccaggttggtctcaaactcctgacctcaggtgatccacccactttggcctcccaaagtgctgggattacaggcgtgagccgctgcgcctggccaaaattcctaaccctcaatataatgatattaggagctcggccctttgggaggcaattagatcatgcggatagagctcctgtgaataggattagtgytgttgtacagagagacatgagagtggcttctctttctgctctctaccatgtgaggatacagtgagaaaatggccatcggcaaacgaggaagtggacctaccagacactggatctgctgtcaccttcatgttggacttcctggcctccagaactgtgagaaataagtgttcgttatttaagccattatggtatatttgttatagtagctcaaactaaggcatctagaggattactgtcacttttatattggtcttcttgcctccaggctcttttcttcaagttcattcattgtacactgctgcctcatttctgttcctaaagtgtaagtctcatctgtcatttctcttgcccactgtttcaataactacctcttgcctacaaaatacaagttgtttagcatccttctatccttccacattatggttgcattttttttttaatcttaatctcttgctgttttgtttctttgtgcattctttaggaagaatagagggcagtatcatacarrgtttacaagtggagactctagaattagaatgtctggatttgaatcttggcattacaacttagtaaagtattaggtattttacttcaactcagcatcagggttctcagctgtaagatgggcttcatatatagcatatggtaataggtctgtttataaagtgcttagcatagtgtctggcatgtagtaaaattgcagtaaatattaactattactgtcatttcttcatggctcttctagttccttgtatatattcatgttcctttttctgtatggagttcccctcctccttaccctcctatccatttgaaatcctaccccttgtataatatccaggtcagatgccacattcctcaagttcccacaccatgaattctcatttttcatcagcaktgtgtttttatctttaactgtcttatgttagtgtttatgtacatggtttatttcttcttggttttaagcttgttgaaggcaaggactgtgtctcttaccttctttggcatctcttttggtacatgtgatagttgcttagtgtttgttgaatttgtgaatgaattgtggttctacgtgaccatacttatgaattgtttgacctagagtgaattgcctgttaaattaactgtctttaaattataatcttcctagttgctgaagtttttagattgctaaattacaccttttcaaccttaacacagtaatgccacattttctttctggctattattgctagtttgtttatgagcattagttagagttctctgatgaagtgtactcattctgtttaatatcaaaataaaatttcagtttggtgtcacttttctgtcattgaattccttgcaggccagaaagacaaactataccagtgtactattataccagtgtattaaacttagcgcctgttaaatgatgttgcacagaaatgacacccacatttaatggaagtgttagagtcagtcattaagttaaaggaattaaatatgcttccaacccaagaagacctctagttcttaagcattagggcttcaaataatttgcttttaacaaatctcattccattcagattcagttcagggaagagcagattaagttcagttgaggggacctgaaacttaaaagagggactgtgattagttgttgcactacaaattttaaagctggagttcttgaaagaaaaaagaaaaagaatgctgggaaatggaagagcaaggagagttacttctctctcttccctcactagactgtgagcttttaaaggacagggrccatacgttgcttgtgtctgtctctgagctctgtcatagtacttcmtgcagtgaatatttattgagtggagttctaaatctagaaagtgaaaaattgcatctaacgctatttccatagtactgtaaagcctccccactctgtaacgcattactttgattcatatgcccacggagtaatttcaaaaagtcttatatgaaaaataaaagaataaataaaacctgtatagtttttaaggtttttttttttttttttaatggcagcctggtcaacatggtgaaactctgtctctattaaaaggacaaaaattagccaggcatggtggtgcgtgtctgtgatcccagctactccggaggctaaggcatgagaattgcttgaacccaataggcagaggcttcagtgagccgagattgcattactgccctccaatctgggtgacagagtgagactccgtctcaaaaaataaataaataaataaataaataaataaataaataaataaaaatataataaggaagtctctcttttctgaaagttcagagttgttagaccaaggtcctgatactgttacacttgccatttaaagcctatggaggtatctcccctttctaccccaggaccacctttataaactggtgattccattctcctgggtttaacatctttttgagtttttttttttttgtatcattggaggggatggtttctgtaactgtgggagtgggaaggtaaaaagtttttccattcttgaagctggtmcaagacttacgtcttwttgaatactttctgtcttttatacacattattaagggagataatatggaatacttcacattataagtaaattacatattaggtgttttataaatgataacattatttagtttattgttaaaaatggtaaaagaatgttatacaggtacaaaacaggaaaaatgcttaaaattttgtgaatgtgccccagaaaactaaataattagaagttagtctgcctgcacattgttgataactttaaatgtggttaggtccattagtttaaaatttgccttttaaaagttagtgggttttttttttaataaatattattatttatttttgagatgggatctcactgtgttgcctaggctgttctaaaactcctgggctcgagcagtcctcctacctcagcctcccaagtagctgggattataggtgtgcaccactgcacctggttcctgaaagtttcttttattaaaaaaaaaaaatctaacaattgacttgctaatattaaatgaatgtttacaataaaaaatgttatttgcccctattgaaaataatgtattgaaatcagtgtgttctaggtcagtggcttcaaagactccagttggattcattggactgggcaacatggggaatccaatggcaaaaaatctcatgaaacatggctatccacttattatttatgatgtgttccctgatgcctgcaaagagtttcaagatgcaggtgaacaggtaagaccttttctttagatttgttttagattttgagaatgaaaaatgaatatacattcaaataagtgacagcttcttagaagtatacccaatggagttgtaaacctaattcagtgttaattttatatatatgtaatcattcatccaacatccagatttgcagtaaaggagagttctcgtyagacattcaggggtatctattctttggcaggtgacttggaayattttgcacgtttggtcagagggccttgttttagctctgtatcagttttctgagatagtaactttactgattgtgctgttaaagtagttagtttggtggaaataacctcctgtgttattaaaagcacatatgtctttaaaacaagagtaggcttagagatataaagcttagtttgagttgaagctcagatacatgctttcttactgggggcaagttacatcacttctgctgatttcctcattcttaaaatgtgaacgatgacaacctatgccattaggttgtgaagctcaaatgagagaatgtatgtgaacatactttgaaaacatcatatggcagcactttgtgaataattattagttattggccataaaccaggagacagcctaaaaacactatgtcctataatgaagagttgagttatagtggatctctagtgtttttaggctatcattcatgtttaaagaattttggtaccagagtttatcatgttggatgataacatctgctggttaagtcttgagttgtttggatttgttaaactttatcaataactcaaattacaggagaccatgtatcagtatcygaatatagtttgttttttctagatatgagggaaattcttcttggtcaagttgtagagtggtaactgaggatagtgtgtgatcccagaacagagaatactaaaaaattcctgagaaaaaggtgagaaaaaaattacacagccagcttctagataatagacttgaaagtaaatactgaaaaatgctatacctagttacagaacagctttaggtaacttagaagccattttcagaactatatatctgaatctttttcctttccatggtttttgtgccatatggaaattgcagcagtatagtgtgaggatggaagtatgactttggaacttttcagggtagtgttgtggctgcttctgcctgttcagtctctgaatacggatattacactcccagtatagcaggcttacaggcttaattaatgtagggacttagtagccttgttggagagatttgatcagtcgtatagtagagaatctgggaaaggcggccttttaccatcttcagagatggtgagcatttcaagttgatattcagtctgagatgaaccaattagtagttattttgaggagacagttattactttttgggataacacatctatttggtattgccattttacagtggtttatctgttagtaagagtaacaagggtacttgatctctaaacagaggaaatatcttcaattaaaaacagaatttaaccaaagagtggggtaggaattgaatggggactattaccctagactggcaaagcagaagcttgtgaccttttacgttgttacagacacaggtactcttccctctatgcctgtagtacttccagcttgtatgtggaacgactgtaatgatcatcactgctttgtgactctctcctgctttttcccagaattctagagctttctgatgctctgcctgaattacctcatactctgaagttaccaggcttacctctgtttcccaacaagtttcttatttctttagtgttgctaattttaggtaggtatgaaggaaggctgccttaagaataaggcttatccctgcatgaaggagatatttatgttttgaaagggagagaaaagaatctaatacagtatttagtgagcacctactatgtgtcaggtcttttgctaaatattttgtatgtattatctcattttatctttgcaacagaagtgctatcaagaaaccaatgcttggagaagctaaataatatccctaatgttatatagtggttcttattatctgcagtttcactttctacgatttcagttacctatggtcaaatgtggtctgaaaatgttaagtacaaaattcaagaaataaacaatttataagttttaaattgcatgccgttctgagtagcatgatgaaatcttgtgctgtccagctctgtcccaacctggatgtgaatcatccctttgtccagcgtctccatgctgcagacactccctggcccattagtcacttactagccgcctcagtgatcgggtgttgtgatatcgcgtgcttattttcaggtaacccttattttatttcataatggtccaaagcgcaagagtagtgttgctcgcatattgttataattgttctattttattgttgttgttaatttcttactgtgactaatttataaattaaactttatcataggagtgtatatataaagaaaaactggctgggcgcagtgtcttgtgcctataatcccagcattttgggaggccaaggcaggcggatcacctgaggccaggagttcaagaccagcctggccaatgtggcgaaaccccggctctactaaaaatacaaaaattagccaggcgcggtggcgtgtgtctgtggtttcagctacttgggaggctgagacatgagaatcgcttgagtccaggaggcggaggttgcaataagccgagattgcaccactgcagtccagcctggatgacagagggagactctgtctcaaaaaaaaaaaaaaaaaaaaaaaaatgctgggcgtggttgtgtgtgcctgtagtcccagctacttgggaggctgaggtgggaggattacttgagcctaggaggttgaggctgcagtgagctgtgtgctccagcctgggtgatggagtgagaccttgccttaaaaagaaaaaaaaacaaaccrgaaaacatagtctatatgtttatataacatagtctgtataggatttggtactgtctgtggtttcaggcatccactgggagtcttggaatgtatacctctcagaggaggggttaccactgtgtagtgaatgaatagcaagagccaatgtctaaacaaaggtctttgacttcggagttttggttctttttgaaattaatgtgaaagacatttttgagtgtgtgtatgtgacatctgtgttgatgattctgaaatgtagctacctgttaacctatttataaactagattgctggaaaataaggtgcctagatcagtcaagccactgatcattkgtctcccttgccttctcttgtgtggttctgtacccacggagttacaatttaataatatttatctattgtatgggttgtttagtgggttgaatagtggcccacctccccaacccccaaagatgtcctataaaattgttaggagaaaacacagaggtaaatctttatgactttggatttggcgaaggattcttagatatgacaccaagagcatgarcaacaaaatgataaataggtaaattggactttatcaaaattaaaaacttgtgctccagagaacaccatcaataaagtgaaaaacaattcacagaatgggataaaatatttgcaaatcatatatctgataaggaatttgtatctagaatatatgaagaagtcttacaacgccagcataagacaagtaactcaattaaatgggcaaaggattttaatagacatttctcccaggaagatatatgaatgacccagtaaacatgtgaaaagatgctcaacatcattaggcatcgtagaaacatagtcagaacagccgggtgaggtggcttatgcctgtaatcccaacagtttgggaggccgaggcaggtggatcacttgaggtcaggagttcaagaccagcctggccaacatggtgaaaccctgtctttactaaaaatgcaaaaaaaattagccaagtgtggtggtrtgcacctgtaataccagctactcaggaggctgaggtgggagaattgcttgaacccaggaggtggaggttgcagtgagccgagattgccaccactgcactccagcctgggcgacagagtaagactctgtctcaaaaaaaaaaaaaaaaaaaaaaaaaacatcaaaaccatgagacacacccactagaatctagattaaaaagttagataacaatgtgtttgtgaggttgtagaaaagttggagccctcatacactgctagtggagatgtaaaatggtacagccactttgggaaagagtttgggagttcctcaaataattaaaagtttagaattatgccatgacccagcaatttcacacctagctatatacccaagagaaataaaaaatttgtatccacacggaaacatgtatttagcaacattattcatcatcacgaaaaagtggaaacaacgcaaaaatctatcagcggatagaatgtccaaacaaaatgtgttatatccatacaatgatgattattcagtaataaaaagaaatgaagtactaatatttgctgcaacattgataaaccttgaaagcatgctgcgtgaaggaagccagtcacaaaaaaccacatactatagacttttcctgaaagtccagaataaggaagtctatatagagacacaaagtagatcagtggttgcttagcgctggggaagagggaaagttgggcatagaggaatgatagctaatgcgtataagatttctgattttttttttttttttaaatggagtctcactctgtcaccaggctggagtgcagtggtgcgatcttggcctactgcaacctccacctcctgggttcgagtgattcttctgcctcagcctcccgagtagctgtgactacaggcacgcgccaccacgcccagctaattttttttttttttttgagatggagtcttgctctgtcgctcaggctggagtgcagtggcgcaatcttggctcactgcaacctccgcctcccaggttcaagcaattctcctgtctcagactcctgagtagctgggattacaggcacatgtcaccacgcctgtctaatttttgtatttttagtagagatggggtttcaccatactggctagactggtctcgaactcctgacctcaggtgatccacccgccttggcctcccaaagtgctgagattataggtgtgagccaccgcgcccggccaattttttgtatttttagtagagacggggtttcaccatgttggccaggatggtctcgatctcttgacctcgtgatctgcccacctcggcctcccaaagtgctgggattacaggcgtgagccaccatgcctggccaggtttcttcttgaaaagattctaaaattgattgtcatcatggttgcatatatctgtgaatatgttaacagggcctttggtatactttaaatgggtgaattgtatgcgaattatatgtcagtgaagctattaaaaaagatatattcaagttctaactcctagtacctgtgaatgtgagctttttggaaacagggtctttgacgatctaaagttaagatgagatcatcgtggatttagggtggaccctaaagctaatgacaagtgtccttaccagagacagaaaagaagacacagagacacagaggggaaggccatatgaagatggaggcagacattagagttatgctgctgccagccagaaaatatcaggagccatcagaagctggaaaaggcaaagacagatcctccctttgagcctttgtggggagtgtgtctctcttgacaccttgatttcagacttctggcctccagagctgtgagagagtaaatttctgttgttttaagtgacggtgcttgtggtaacttgttgcagcagctgtggaaaactaatgtagcaaacattgggaatctacaaaatgtgtaggttttgaatctttctataccacttagtatctgtgcaatcttgggcaagtttttcagtgtctctatacgcttgtttccacatgtatgaaggataatcatactgttttcatagacttgttatagggattaagtgagttaattatgcatggagcttaaagtagcatttggcacatattaatcactgtatgttaatgttaactataaattagtttctgtgtgccttagtttcacctctgctgtacacagctgttcctcttctcatgctgtccattcaacaggtagtatcagatattctctccttttttgtgaagaaaagttactttttattgctctaatcactatgggttaaggctactgtagactaccttagcaaaatgggataggaccttcattaagtcactaatgtaacagatgtttctcgagaactttctatgtgccaggcactgggaatatagctcagaacaagacagtcacagtctgtgcctttagggaccaataggtggtgttagattatcaaattacacaaatatgtgattccaaattgtgataagtctaaagaaaaagtaaaaggtcacattagtttttagtaaaatatgtgttacattaggtgagagggtggttaggggaattctctctaaagactagacatttggccgggcgcggtggctcacgcctgtaatcccagcactttgggaggccgaggtgggcggatcacgaggtcaggagatcgagaccatcccggctaaaacggtgaaaccccgtctctactaaaaatacaaaaaattagccgggcgtaatggcgggcgcctgtagtcccagctacttgggaggctgaggcaggagaatggcgtgaacccgggaggcggagcttgcagtgagccgagatcccgccactgcactccagcctgggcgacagagcgagactccgtctcaaaaaaaaaaaaaaaaaaaaactagacatttaggcagacagcgaaagaataagtaggatttatccagattaagaatgaggacaaaggagcagtttcctcaaaaagtggagcctcagtctttgctgaagacttttactttaggtcaacagagatagcttgagtaactaccaaatgtctagtagtttacctaatgctgttgggaaataaaacaggttgagttggatgtgacgaggtgttggatatgtcttaggtggcaagaccaactaatactgcaaggaagtttctattgtaattttactataattaagtgctaaggcaatttttgaggaagaaaaaaataagcaactcttaaggatcatttcatttctgatagggaattacaggaagattgcatgtaatctttactcacccaacaaagattgtaaaatgaaagtcatgaaggacaaggtctccaagattcctgcataaaaatttgagggttccaggacacagactcagttactgggttttcctttttcttcttccttgcaatatgtcactgggtgtgaagaaggaaagaaggtgggttctgggtcggtgctcctcccagattagtgaataatagcgaagacttagcttcttgtgcacagttgccactcctcccccaatacacagtggggaaaattctgtgtgtggttcaccctgaggcaggaagcctggaagacagaatcttgcctctcttcctcacatctctcattctcttaagcatcttgactctargaggtcctctgagtattgattttaacagcagtggaaggtgggacaatgtgaaattcagatgaatgaagtgagaaaggtaaagggtgaaaaagctttggtcctgagggcaacagaaaatgaaagcatttgttgataaatgatttacgttggcagcttagagagtgttttgaacagtggccatgtcatcagaacaagtgtgatttcctaagagcactactttaaaaggtaatattaatttggatgaatacgttctgatatattaaaatgtcaacattcttatttcatagctatgtttagttttttaaaatgttggataaaagaaaaaacgaatttcattctattaccataaggccaagacacgacttgggatgagatggaaaagtatgtgtgaaactctgaaactttttgccacaatagtgccctgaagggtgggtttaaaggttaaaaaattcagcgtatatttgagttgactcatacatttttaaggacgggtgtccatttcctccctctgcgttactatatcaagtcaagctgatgaagtgagagccaaagaaaacaagcccatcccccaacaccccaccaagattgcagaaatgctggttagttgatttctaatgtcagctgttctttcagtgagagatttgcagggaagaaaatcagatgttgttttgaagaagtgcttttgtttttttgaaagcaaaaactgagaatttattgtttcatgtattggaagagttggggagtggcctgacctctggcagagctgaatttagtgacatagatacagccagattcttttcttttctctttgcttctggagtctgcttttctccatcaggctcctctctcccttcaaggtgcaagatggccacctgcmgttccaggtgaagaagtattttagaatattatgaccctggaggcttttcttcaagctttagtaaaaccgtagtcatgcacctcataaggatgttttggtcatggactgcatacataaaggtggtcccataggattataatagagtatttttactgtaccttttgtatgtatagatcattaaatgtacaaattcttacattatgttacagttgcctacagtattcagtacattaacgttgctgtacaggtttgtaacctagaagaaatacactacaccatgaaggtctgtaagtgctctctctgatgttcgtgcaacatgaaatagcctaacaactgtcaaccttattaaaataatgattcagaaactgtgattaggtatagagtttattcaggcccaaaaggtggaaaatggccacctggaagcataaattcaagttgccttgaatatatacgattagcagatgttacaagtgattttgtttgttcatttcttttgagacagggtctctctctgtcacccaggctggaatgcagtggcgggatcatggctcactgcagcctcaacctcccagactcaagtgatcctcccgcccctgcctcccaagtagttgggaccacaggtgtgcaccaccatgcccagccaatttttgtatttttgtagagacagggttttgctttgttgcccaggctgggcttgaactcctgggctcaagtgatcagcccaccttggcctcccaaagtgttgggattacaggtgtgagccattgcacctggccccaggtgggtttttaaggaaaaaagaagaggcagttcctaagttgtttaacaagagtttacattaacataaattattaattgactgtacattgttctttgtattccaaattccaggaatatgacaataataagggaggcagctagtcaggaacaaaaatgcctttaagcaattgccactgggcacggagggtggcggtgaccaaagtcctatgcttacgtctctctgggcctgataaattttgcaaacctcacatagttcagactacttcaagttatttttcttttctcacaacgcatttctcagaacgtatctcttttgcttgactgtacgtggattattagggaaataaaaactttgataagtttaatatgttttacaggactacttaatagcttgtttatgcctttaagtgttaacctattctgataaggcatttataattggttgaacttgttatttgtggtcattttcataaaatatgtggacgtttccgtatccctttattttttttaatttaaaaacaaaatcagagggaagtttttattatataagcatttattaaaataagttgggcagaatgatggactcagaaaatgagtgtgtttgtagggcagcctccaaggcccacaggaagcttgcagttgatgttttttaacttttaggttcggaggtaattgtgcaggtttgttatataggtaaattgcatgtcacaggagtttggtgtacagattattttgccacccaggtaataagcacggtacctggcaggtagttttttgatcctcaccctctgtccctccctcccccctcaggtagtctcaagtgtctgttgttcctttctttgtgtctgtgtgtactcagtgttttgctcccacttataagtgagaatgtgtggtatttggtttctttccctggattagtttgcttaggataatggcctccagctctatccatgttgctgtaaaggccatgatctcattcttttttatggctgcatagtatttcatggtgtatatgtaccacattttctttattcagtctaccattgatgggcatttaggttggttccatgtctttgctattgtgaatagtgctatgatgaacatacgggtgcatgtgtctttatggtgaactgtttatattcctttgggtatgtacccaataatgggattgctgggttgaatggtaattctgctttragttctttgaggaatcaccacactgcttccacagtaactcatctaatttgcattcccaccagcggtgtataaatgttcctttttctctgcaaccttgccagcatctcttattttttgactttttaataacagccattctgagtggtgtgatattgtatctcattgtggttttgatttgcatttcactaatgattagtgatgttcagcattttttcatgtttgttgactgtgtgtatgtctttttttgaaaagtgtctgttcatgtcctttgcctactctttaatgcagttgtttggtttttgcttgttgatttaagttccctgtagattctgagtagtagacctttgtgggatgcatagtttgcaaacattttctcccattaggtaggttgtctgtttattttttgttgatagtttcttttgctgtgcagaagctgtttagtttaattaggtctcatttgtcaatttttgtttttgttgcarttgcttttgatatctttgtcttgaaatcttttccaggtcctatgtctagaaacagtatttcctaggttatcttccaggtttttatagctttaggttttacatttaagtctttaatccaccttgagttgaattttgagtatggtataaggagggttccagtttcagttttttgcatatggctagccagttattccagcaccatttattgaatagggagtcctttccttattgcttgtttttttttttttttttttttttttgactttgccaaagatcagatgggtataggtgtgcagcattgtttctgtactttattctgtcccattggtctgtgtgcctgttttgttccagtaccatgctattttggttactgtagccctatagaaaagtttgagtttgaagttgggtaacatgatgcctccagctttgttctttttgcttaggagtgccttgactatttgagctccttttttggttccatataaattttaaaatagtttttttctaattctgtgaagaatgtcattggtagtttgataggaatagccctgaatctataaattgctttgggcaatatggccattttaacaaaattgattattcctatccatgagcatggaatgtttgtgtcatctctgatttctttgagtagtattttgtaattcttgttatagagatctttcacctctctggttagctgtattcctgtattttattctttttgtggctattgtgaatgggattgtgttcttgattgggctcttggcttgattgttgttggtatataggaatgttagttatttttgcgcattgattttgtgtcttgggacttggctgaagttgtttatcagcttaaggagatttgggctgagactatggggttttctagatacagcgtcatgtctgcacacagggataggttgacttcctctcttcatatttgaatgccttttatttcttgcctgaktgctctggccaggacttaagtactatgttgaataggagtgatgagatagggcatccttgcctggttccggttttcaagaagagtgcttctaccttttgcccattcagtatgatgttggctgtgggtttgttatagcttatccctttattatattcgtgtttctgttggaaacagatgcatcatttcaacttttagcatctttttaaaaaacgtaactgataataatgatcagatcttaatattttagaaattttgaatcaataaattgcgaatgcagtgatttaaaaatataaaccccggaaccaaactgtctgggctcacatctcagctctgccatttgctagctgtgtgacttcagattacttaacctttctctgcttaaatttcttattcttatataaaatggggatgataagagtacctttctcttagcccaaaagaacctggcacatagaaagtaccattactgctgctgctactactattactgctgctgctgctgttactgtatctatgccatatttctccaaaatctttattctccaacataccccaaacaccactgtctcagctgcattattgagtccagaatatgttgaaagagaataatagatgtattttcattcttgattatagccaaaaggccaagaagtgatatgtagacatatttctaaatgaaagaatgaagatacaaattaaaaccaaactaggaggtaaagtgatttgacagcattcctgtttaagagtctgctctgcactgccccttctgacccacctttattttgcagaagatactggtttttctttttaacttaatccttagcatcaaggacatgtgacttgtgcttcattttcattgtctaggattttccttggagatgctgctgatctatgccaaaagtctgggatgtatgcaccacttctgtgtgagtttattctgattgaactaggcttaattagattctcttttcttttgttttctctttaaaaacttggaaaccattttgttgttcctgagttgtaaggctgaacatgtttgcttaagtaaatctcttgggatctaatctggcatccactcaggtcttgttaaatgagagctttaaaagcctcttgctgagtgggctccatcattgttgaccaaatgtttcaagatgtaggcacaaagcgcttttgtcagtttttcaagtgtagtttaattttgaagtaattgtgcttttctacttttaaagtatttaaaaagtacttttaaagagtactgttaaagattaaaaaacacaggagtggcaagtttaacaagatcacattcttcttgtttctttataaatttctgttacccatctggtttacttggaagcaatgctgaacttaacttatgtgactgttttatctagaagaggcagcaagatttttctcttcatgtaaagcaactaggtaacatttgtcttcttccaatggatatgtaaaaagggggtgtagtcccttcagattactcttggctcttcacccccctcctcatgctgcaaagcagattttttgttattaaacagatttttaatttattttagcagatttttaatttattcagtcctctgctctttatattacacacccaccattgatgcatactggcatacagataaatcaaagtctaattcagagaaattggctgcaagaattcttaaagactatattgtggtttacacagaaaccaatttcctgtagtcaaaattgagataatagaagagtagaattatcttaattcataatagtataagtatgaggccgttggaattagcaggagatctgtctgggctcggagcagagccatgtcccagagtcagccaggccaatgaccatccccagttatggaggtgttgaaaacctgcacggtgaaagtcctgcaaatgctgtgcattgtgctgaatcattgcacatgcttccagtccccttagccccttttcatgggaaccataccttcttagaacttgagattactaaatatgaaaaatatctgtctaagtttcctttttactttggagataggaaccctgagagataacccaaatcactgtttttattttatagatttggaaactgaagctggagatgttacatagtttacacaaaatcacccatgacttcttggctgagctgcaacttaacccgggtctctggcttcccaaattagtgttcctttcactgatccatgctgtctttgcttatccattcaattagcaaatgtaattgaaggactctaattagtttggcttctaaaggcttttgtagttgatgtcagactggcaacaaggttggtttgtttttcctcccagcttttgagttgtggccagattttgtcagtcaattatttcagggtcttgaagtcatcacatggatggtgagattgtttgaatgtctgtttatctgtctgataaacatgcctttgtagtacaaattagagactgttaggatgtaccaaatacacacacacacacacacacacacacacacatgcacagagagagagagaaagagagagagtgtgtgttattaggtatagagcagttgtggccagtacagtggtgacattccagctatcactactgttgtstatttcttccgggcctgtgagctttgatactactttcctatayaattgaggggttagcagtattctggcaatgcaaccatctcaagaagcagatgctagggatgcagggggctgattggccaccccatgcacttggcaagtgcccgaattggcactgccagtttatgggattaagaaacttggagctgtgaaacatccttagacctgtgagctaattgttggtgcccttcagggcccctctaaaggagttatgtagatggaatttaatttctttcagtgggagagaactcaattcctaagagagagttgaaattaactcttagacctcaggttttactgatgtcccttaaaggtctggaaggatggagctgcaatagaaggaaagtatgccattgttttgcattgtgtttattagagtaggatgaacaaatgggactaagtaacatatatttggtatagtataggagtagagaagtatgactactacaactttttttttcttatttcactgagctctatttttcttgagtaaacttgaactgtttgccaggaaatagttgcctcttctagagtctcaatatttatgaaggtgtaggaaaggttttcatgcaacttaagcgcttatttctttgtaatttgatggaaaattttttaatttttagaattatttgtagcaagtcctcattatatatcaaaatatacaggttgaatgtatctcattgtagattataaaatgctgtattgtctttagagtgaaacattaaaagagaatatctttttttgttgttttagggtctgagatattttataatatcatttcctagcttgttaatacacaatatgccaggatacttgatttactgaaattttaaagagtgacttatgaaactgctttttgttaaagctacatttatcctgaatttgatttagaagctgatagtctcttgtggaaaactgaaatgtaattacttctagctcttaatatttagattacacactctgtttggcttcctattcttttactttcatcaaatgcacataaatacaaaaagaacatgtgtaaacttctrccacatgaaaagcagaggcattcctatttgtaagatgcttacatgtcccttcacattttctagtagaaatacgtttctacatgcataatgtatgtagaaatatgttagtttttacatatgtaactcattctggagagaaatcctcaataatctgcctgatcgtcttttgtctttttttaatgaagagaaaaaaggctttgcagaagatgttgtgacagttgggatgccggatttcttttctttttcttttttttaagagacaggtctcgctctgttgcccaggcaggctggagtatggtggcgcgatcatagctcaccgtaacctccaacgcctggacttaagttatcctcccatcttagcctcccaaggagctgggactactggtgcgccccactacacccagctaatttttctattttttggtagagatggagtctcaccgtgttacccagactggtctccacctcctgggttcaggcaatccttctgctccggcctcccaaagtgctgggattacaggcgtgagtcattgtgcccagctgattctttctattaaaggagagtttgagtcaaggagggagctcctggtctctcctgacctctttggttgccagttggctggccaggtttatcaaggtgaatatgtggaaaagagccagagagctggggatgggggatgtgagtaacagtgcatctactcatgcatgcacctaagcaaacaggatagacagcgcaattttcctttgcagtatgttcgtggtcattattaaagcagaaatgagggttgagagagtgccctgatgcctattaatatatctttattctgtatgtagtttccacataagtttcggtagctcatactgttagccttcctggtggtacttgcagtcattgtagtaagtgtttatgtccttgtcctgaccttttcttttctgaaacagacttttcttttctgaaacagatattttcttcttttttttttgcttgaaaatacagactggaggatggtggggactgggacttgagattttgttaggggattttgctgcccaccaaatcactgatgaatcctacagttgagttaccagcgttgttgtactagaatatttttcttagtcaaagtgtataccaaagattatgctgtttaggaatccaacttggaagaacccatgagaagtgtgtctgttcccaggactgctgggttttgcccttttaccctcaactcccttcacacttttaaaaataaacgatagatttgatttcacagaaactgcatctgtatatgtataatgatgtgcctttattttgggcagtaagcttttttttttttttttttggtcatttgcaaacaaggattagtctttatgcactgtcactgttataggcatgcatgaaaagtggatcctgtttgtgctctagaaactgcttacattttaatttaaataatgtgcctttgcaattttttttaaaggtagtatcttccccagcagatgttgctgaaaaagctgacagaattattacaatgctgcccaccagtatcaatgcaatagaagcttattccggagcaaatgggattctaaagtatgtatttctcacctgtggatattttcttgttatgatagttcatgaatttcrcrtgttagaactattaggaaattacaattgtgtttgttaaacctttctatactgtttttatttcataaagtgaatagtgtggtggttttctcattgtaaaaggcttattttttcactgaagtcaagtatgtgacaatgtgtataaaattttttggttccgtttctttcctttaactcttgcgttaaacttaccctttcactagtaacatgtttaagagacttttaaagcttacatttgaaactgcaactgttaataatataattttcttacagcttatagaaattcaggaaaagggttttatgaaaaatatagccaaacattggaaagaacaccatcgtttaacattttattatacgaaaaaaagttatgtcctgtgggttagtacgtttgtagtaagaactttgggaagttggaattaaaggttagcagtagctctttaacccatttatgtcagaggttgcaaatttttttgtgaaaaatcagaccttggcaatgaccttgagtagtaggatgtactgcttgagcagtaggatgtaaataactcccacaaacttagcataaatggaacactaggcataaatgggttaagtaaaatacagtttaagtcagtttcctaatcagtgcctgtcttccctggctctgagaaaccttttggttaattgctgcttattgccaaacccttgcggttatgttaggatgatagtgattgaattcccagcttagttttgtcatgtcactgtttctattcctaacttattttgttgttgaatttcagcaaagagctagagcaaactggtagacactgtagtcacaagaagggctaaaagaaagggtgtaattttaggaaactgtaatatgtgaaatttgaagtttctggtaattgaattgtgttggaaaactaaccaacttggaaggaagcaaaagacacttggatattaggcagaaaactgataagataaatgtttagatttcagggaaggttaaaagacactcattttggatggagctctcagggccacagtgtgtgtggtccagaggcatcctagctgtcctgttacctagcctgttacagttatggtcctgctttacctctgaaagaaaagttactaaaaacttctgaggagacatagccctacatttgttaatatcctttgctaaggaatatggtgactagctatcagaacagtttggtccagggagtgtttttaaaaagtttgactttacattgaactataatttgcttcttatgggtgattctttatttttttctgggtgaggatcatttccatacacccagtgcatgtataatttttgggatgattttccatttgttgaaaggtttaagatcttaaaatattaagatcacagattgataaacttaattcttattcttttaggctaaagagaaacctacatactcttggagtatgctatttctcttctgtgaaatatacccaacaattgcatttgaattgtaacaattcatatgtctaaaattgttgtttaaacaatttttaatatgtatatttttcttttctttttattttagacgaggtcttgctatgttgcctagtctggtctccaacctgtggcctcaagtgatccttctgccttggcctcctagagtgctggggttacagccttaagccaccatgcctggttatgtttaaaccattttgtgtgctatttttttaatagaaagatttttccttttaatagtttttatcaatgatttttctgttttcttcttcagtatttatatttattcagttttaattttcttatcatgattccatgccctctgggttagtatatctatagtaagaactttggaaagtttggccaggcacagtagctcacacctgtaatcccaccactttgggagactgaggcaggatgattggttgagcccaggagttcaagatcagcctggacaacatggtgagatcccatctctgtaaatataaaatttaaaacttagacgggtatggtggcatgcacctgtggtcgcagctacttgggaggctgaggtgggagactctgtcttaaagaactttggaaagtttgaattaaaggttagccataccctttaaataaattataatttaggttagagtttcctagctagtgaagatagacactgccttatagtgtatatatataagttaccctaaaaagccaaaaagactgtgagatttccagattctttcatatattttcctttctacctgcttgatattttattttgtcattaaagttacaattataaaataatatgccatcccaacacaaatggctagattttaattgcttatgttcttcattgtggaaataacacggatatatgaaatttgcagtatggcttgttaaagacaaataaattactttttaaagatccagctactttacagacaaaaatttaagtcctatctaatacccttttaaagttaataggtgttttaaattgcttacatcttagcttcatgtttattattatggttagtgtgtagttcatctgaaatcagaatttataccatgtagtatattaggttttattaggttttttttggatcttttgaaagagtttgggtttacttttgaagtacaattggtctcaaaaagaatgagatttttaaacgtgttctaattaataatgtttttaatactaaactaaaatcctccttgatatatggcagcttttcagcagattctaattctgtaggtagttgcatgaaatttttactcagagttgtaaactacaaatatttttatttatttacttagaaaagtgaagaagggctcattattaatagattccagcactattgatcctgcagtttcaaaagaattggccaaagaagttgagaaaatgggagcagttttcatggatgcccctgtttctggtggtaagtggtagctaaaatatatgcaaacctatttatgtttgtcaaaagtagcaattatggttttgttgtaccatatggttttgtagtagttatttttagacttgttacaggattctcattaaaaataaaaccaaactgatacgttatttagtactctcaagtctaaataactaacattgttagtcttaaattcagataaaaaagtgtcataactttgaagtgttgtgaatttttggtccatttactgtggataggaatacatcagtttttagaaaattttttttggaactaatgaaaaaaaaatcagcttaaataatcctgtaactgttamrgaaattgaacaagtgggaaaaaaagaaaaacaattgtttcacaagggaagcattggctcagatcattttacagatgaatattaccaaaatttcaaggagcagatcatctaaattttatacgaacttttccagagaacaggaaaagaggaaatacttcccaattcattctgtaagacctttataactctgatatttacaccagatagaaatgttataaaagagaaaaaataaatataggtttattttagtcatgaatgtagatgtaaaaactttatattagcaaactgaatccaaccatgtatgaatgagattaaacactataaccaagtttcctttagcccatgtatgctgagatggcttaattttagaaaatctgtgcatataatttaccatgttaacatggttaaaagtcatatgattgtctcaattagaagaaaagacccactaatgaaatgctaaaaatttactattaactcatacattaatagcaggtatctgggtagtttggaayggcaggattatagtatggcttctctgtaatttccaagttttccaaaattactgtgtaatcagaattactgtgtacacatttatattatgtatttgtagcagtatagcagtagacagcagaatatgaattttattccagttacattaaacttgattgtgggctttagaattaaaaagtaacatataataatttaaatcatttcgtatttttttataaagaacttaatgatcttgtagaggtaccttatatcccaaatgatttttgaatataggtggaggaataaataattgctggctcttctgattgttatattgaattacttaaataggatttaggtataaaaatttatgatgtggtataggtactttgattaaaagtacctacaaaatactaataagcagttttaaggttggcgttaatgtggtttttattggatggaattaataaactgaacagatctttcttagagtggttctgcagttgaatttgaaaattggtatggtacaaatgttcttgccattgattgattttctttggtctcaagagtacaacctgaaattataatctgataataaaaaataccaatttgatttttaaacattattttaacctttaaaatataatcttatgagaaaactttgaaattactcttttgttcttaycaagcaatttttaaactttggtttgttgttttagtgtacaaaaatgctaacataactgaatacacctgaacctgcatatgtagtagattaaaagctttgtgcagggatgatttgtggtaatttattggttgacacatgatcattatgaggttaaccagtatataatagcagcttatttatattggtcttattgttattatgtttatattttttaacatggtatgttacaaactgttccaccttcccacttaaaataggctggtttaaaaattactgtattttaactaaataaagttaaaccaaagtgttataggaccactaggtttgattgcttgttgcatgataacagaccagtatgcagacacaatgggagttgcagtagagaaagagtttaataattgtagggcagtcaaatgagacagaggaaccttcaaatcctcctccctccagggtttggggatggagcttgtaaagggtctgaacaggtagggctaaaatgtggggattgctgattggtcaagaagcaagggggaattcctgggacagggagatgaagaaaccgcattcctgtgcagagttggttggttccttggttgaggtcttgagactggttggcttcagccattctgctggaattcaggacctgaaaaacaccataagcaattcttgggtaaaaaggtccagtgtcagagattctgtgtataggaacaatgggggagcaggtggtcagcatgccgcatgacccttggttagttaccagctacagggaagtgggttgaagtaccccagtgcaccctggtcaatgcctgactataattctgcctaaagcctggcttgtagttctccatcaactctgtgagggtggtttcaaaagggatgtggggaaagcatggcttagatacccagaatgggcccacagttttatagaagtccagtgttcatcagtcttgaaacatggaatctttgagatcatttgaacaaaacttgaagaatttctccccatccctttctcccaagtcttcatctatttcctattccagactttaaaaaatgcatcatggatttatatataggtacgtacaaatagagtagtattctaaaagtgtaaatgggaacatactatacttctattatcctatggttagtattttaaagagaagtttttttaaaaaactcagatgaatttaaaatagtaatgatttttgagaagcaattggtttcttcagtcaagcgtttccccctacttcctggtaagtattattctggggagtaaagtaagaattattacttaatcatttttctagcctatggaataacagatggaaagttttcctcaggtttcattttgatacttattagacccactgtgtaatggctcctgtgtacattatccttattagaaagaatacaattgtatttaagtgctatatgacttcttttaaaaatcgaaagtaatgcttaaactgttatgtttatcatcctgaaaccaatgtgaagaaccactttaatatttgtgtagttatcactttatagtatagatagtagtttataaagcactttggcatgcctcagcctatttgatgcttctttttgttttaattttaatttttgtgggtatataataggtgtatatacttaaagggtagatgaaatgttttgatactggcatgcactgcctaataatcacatcatgtaaaatggggttggtgcttctttttgaagctgtcaaactgtacatcttttttttttttttttttttttttttctgagacggagtctcactgtgtcacccaggccggagtgcagtggtgcaatcttggctcactgcaacctctgcctcccagggtcaagcagttctccctgcctcagcctcccgagtagctgagattacaggcgcctgccaccacacctggctaatttttgtatttttagtagagacagggtttcaccatgttggccagtttggtcttgaactcctgaccttaggtgttctgccctccttagcctcccaaagtgctgggaatacaggcgtgagccaccatgcctggccttaaagtgtacatctttatcagagcccacatcacgctatatttataggctatgattctcttcctcttgagtttaagcttttttagtgcagggagtaagtttttttccccaatttttaaaattaaatattgaatatatgtgcaacatatttataaaatatatgtgcggtataaagtgtaagtatacattgaactaatacgtaccccctactcagtttaagaactagagccttgctatttattacctttgaagttcttgtttccctgatcctattttcttttctctctgatgagaggtaaccagcatcctgaattttatgtctcattcccatgcttttttttttaagtttaactccatatgtttttatttctaaacagtagtttattttccacctttggaacattatagaaatgttccataatgagcatattctgtgacttgctttttcactttacactgtatttctgagtttcaaccctggtgttactagagccactggcttacttggtacctgtgtgagaattagaaagggcacctctctataccaaaatagcccttcaggtgagcagaacgaacctttgtataaagaaaaaggtatgcctttctgtagacacatgtagccttatgtcagggtttgcggtttgacacattgaatgtagattaaatgtcagcccctgctcacccatttggctagatgcccatgtgcagtacataaaatgtattgccattatgtggttgttacgtgcagttctttcattttaactgctctgtggtattgttctatataaatacatcactattttttctttctattgtgatatacatttggattatttccaagttaaaaaaatattcgcattcttacacaccatggaaaggtgtctttttagtctctgtttttccagtgtaatgcttagaacatggttggtcttcactaaatgtttaaaaacttgagttgacttcaactggaaaaacaaccatgtgaaatagacaggataagcagtgatactcccattttaccaagggtggaagtaacaccaagagatattagataacttacctcaagaccatactgttgatcaggggcagaattgaaggactgatatgatggttctttaatgcatattctactgtattaggaaataatattttctagagttctcatatatttcaagagggaaataaagattgctaaatggaagaattagtgaccttagggctaagcagcagatgaacattccagctrgacccaatctaaagtgcttacctacagaattgtgaacaagtaaggccactaaatttgggggtgggtgttatatgtagcagtaaataactgatgcagccaataaagttgatatttccataattatatagaagtatttaatgttgcttgtattatcagtgtgctacctgtgcttatttagtacaagtgttataaactctttctgaaggagaattattgtaatgcggttttgatatgaaggccagctttaacattactatagccttggaatatgttttgaagtcaggtaatgtggcatctctagccttgttcttgttgctgaggattgatttgaataatcgggctcttttctggtccgtacaaattttaggattttttttttctgatattgtgaaaaataacttggtaatttggtagagattgcattgaatatttagattgctgttggcaatatggtcattttaacaatattaatttggccgggcatgcggtggcttatgcttgtaatcccagcactttgggaagccaaggcaggtggatcacctgagctcaggcattcgacaccaacctgggcaacaatgtgaaacctgtctctactaaaaatacaaaaatttggctggccacggtggcatgcgcctgttgtcccagctacttggtaggctgaggcgggagaatcacttgagctcgggaggcagaggttgcagtgagctgagatcgcaccattgcactccagcctgggtgacagagtgagaccttgtctcaaaaaacaaaaaacaatattaattcttgtgatctatgagcatgtcatgtttttccatttggttatgtcatcttcaatttctttcatcagtgttttgtagtttttcttgtagagatctttcaccttgttaaatttattcttagatacttttatttttcatagcaattataagtgggattgctttcttgatgttcttctcggctagatcactcttggtttatagaaatgctactgatttttgtgtgttgattttgtatcctataactttactgaatttatttatcaaatctaagacttctgggttgagttttaggtttttctaggtgtaagatcatatcatcagcaaaaagggacagtttaacttcctttattccgattttgatgacttttatttctttctctttcctgactgctctggctaggactttcagcactatgttaaataggagtggtgaaagtgggtatctttgtcttgtttcagttcttagagaaaaagctttcaactttcccccattccatatgatgttagctgtgagtttgttgtatatggcctttattattttgaggtatgttccttctatgcctagtttgttgaggattattatgaagggatgtggaattttatcaaatacgcttcctgtgtctattgagatgatcatacggtttttgtccttcattctgttgtgatgtatcacatttgttgatttgcatagaaccatccttatatccctggtgtaaatctcacttgatcgtgttgtattatctttttgatatgctactggattctgtttgctagtattttgttgagaatttttgcacctgtgttcatcaggtatayaggcctgtagttttctttttttgttgtgtccttgtctgattttgggatcagggtgattccagcttcatagaatgagttagggagaattctccccatttcagtttttgggaatagtttcaaaaagattagtattagtttggtagaactcagctgtcagtttgtctggtcctggacttttccatgttgaaagatgttttattattctttccatcttgctacctataatgtcagttcargttttctatttctttctgattcaatcttggtaggtcgtatgtttctagaaatttttcatttcctgtaggttttcctgctttttaagcgtatagtagttcataatagtctctgatgatcttttgtatttctatggtatcagttgtaatgtgtcatttttcatttgattttatttgaggcttctctcttcttttcctggttaaactagccaatggtttatcaattttatttatctttttgaagagccaaatttttgtttygttgatcctttgtatttttaagtctctatttcatctagctctgctctgatctttattatttattttctcctgttcattttatgttatgttatgatctttgggcatttattgctataaacttctctcttagtactgcttttgctgtatcccagaggttttggtatgttgtgcttctgttttcatttgttccaataaatttttttaatttccatgttttcttatttttaacttttttaaaaaaaaataggctcttgccttgtcatccaggctggagtgcagtggtgcaatcacagctcactgcagcctcaacctcctggacacaaggggtcctccagcctcaggctctcgagtagctgggactacaggtrtgtaccaccacacctgtctaatttttgtagagatggattctcactgttttcccagtctagtcttgaactcctgggctcaagtgatcctcctaccttggcctcccaaagtgctggcctcccaaagtgctgggattacagccatgagtcatggtgcccagcctttattttcatcttaatttcttagtcaaccrcagtggtcattcaggagcatgtttccccgccaccccacccrtgtatttgtagaattcttctttgtattaattttagttatattttattgtggcgcgaagagatacttaacaggttttcagttttttgtttgtttgagatcgagtctcgctttgtcacccaggctgtaatgcagtggtgccatcccggctcactgcaacctccacatcccaggttcaagcgattcttctgcctcagcctcctgagtagctgggtttacaggcttgtgctgccacacctggctcatttttgtatttttagtaaagacggggtttcactgtgttggtcaggctggtctcaaaccgctgacctcaagtgatctgcctgccttggcctcccaaggtgctgggattacaggtgtgagccacygcgcctggctgttttcagttttttaaaagttattcagacttattttgtggcctaataaaaggtctattctggagaatgttccatatactgatggaaaaaatgtatattctgcaactgttggataaaatgtgctgtaaatgtctgttaggtccattttgtgtaaactccagtttaaattcaaygtttttttcttgacttcctgtctaggtgatctgtttaacattgagaattgggtgttgaagcccccaactattattggatctctctttcagatctagtaatatttgttttatgaatctgggtgctccagtgttgggtgcatatatatttggaattgttatatcatcttgctggattgattcctttttcattatttaatgccctacarttaatgattgtctttttttattgttctttatttaaagtctgtttgatgtaagtataacgattcttgcttgctattggtttctgtttgcatggaatatctttttccattcttttactttagctgtgtatgtgtccttattagtgaggtgagtttcttgtaagcagttggattgtttttttttttaaatccattcaacctttatgtatcttttaagaggataatttaatctgtttagttactatcaaggttattattgatatgcaaggctttgtccctgtcatattgttaattattttctgatgktgttatatattttgtttctttccttttctctcattgttagtcattatggcatggtggatttctgtattggtaccatttgagtccttttttctttgtgtgattgctttgctggtgagttttatactttcatgtgttttcatgatggtaaatgtctttttgcttccaggtttaggactcccttgattatttcttgtagggctgggctagtggtaatgaattccttgagcatttgcttctctagagaagactttatttcttcttcatttgtgaacagtaattttgttggatacagtattcttggctgccagggttttttttttgttttgttttggtttgtttttgttgttgttgttgtttttcctgtcagcactttgaatatatcatcctattctcttctggtctataaagtttctgccgataaatcttctgttagtctgatgggggtccctttataggtgaccagatgcttttgtcttgctgtttagcttagactttatttatttgtttattagaaacaaggtctcagtctgttgcccaggctggagtgcagtggtgtgatcaaagttcactgcacccttgaactcctgggttcaagcgattccccccaaccccaacctcctgagtagctgggaccacaggtacgcatcacaatgcccagctaatttaaaagttttgtagcgatggaatctcagtatattgcccaggctgatctcaaactcctgggctcaagcgctcctccaccttggcttcctaaagtgttgggattacaggagtgagctaccatatcctgctggattcgactttagacagtctgattaaaatgtgtagtgaagaagatcttttagcattgtatctttctgggaattggtgaacctcctgtatctgaatatttaaatctcttgctagacttaggaagttttcacctattctttcattaaatagattttctgatcttttcactttctctgtgggtttggagatactgatgatttgtatatttggtcactgtatgttgtcccaaatgtcatgaatgctttactcattctttttaattctttatttttgtctgactgcattatttcaaaaaatctatcttcaagttctgagctttttatcttctccttgtgtagtttattgttgaagctttctaatgtattttatatttcctccaataagttctttagttccagagtttctacttgttgcttcttaaagatatctatctctttggtaaatttcacattcatatccttaattgttattctgatttgtttgcattgtgttttggaattaatctgtttttcactgagcttctttaaaatcaatattttaaatgtattatctggaattttgaagatttttaaaaattaaaatatattgttgtagaattgttgtattcctttggagatgtcatatttccttgctttttcatgtttcctgtgtcctcatgttgatatctgtgcatctggtgtaacagtctcttcctcctatttttgaatttactttttataggggaagactttttcttaaaggtgtatctgtggtttcatgattgagcagggctctttggctttgattacggttgcatgcagtattatagtcactgcatggtttccttggctgtaaatagcttttctggtatctgttacttccttggagggttagggtgaagttattagtggaagctgtggtgaagttgtggtgtggactgggaagccaggtaggccagtgttcaggccctagtggtggcagcagtgggctgtgcatgctttgttccccagggcaattgatacagtttggatatttgtctccccaagtctcatgttgatatgtaatccccagtgttggaggtgaagcctggtgggaggtcacgggggcagatttcttatgaaagtttaacaccatccccttggtgctgtccttgcaataatgagtaactactcaggagacctgcttgtttaaaagtgtgtggcaccttcccccttctctcttgctcccactctggccatgtaatatgcccactccgcctttgccttccactatgagaaaaagctccctgagggttatccaaaagctgtgcagatgctgatgccatgcttcctgacaacctgcagatccaaaagccaattaaacttcttttatttataatacccagcctcaggtatttctttatagcaatgcaagaacagcctcatacatgctggcacctgtgtcagtggttaccagtggaccaattcttgggctttcacatggcttactccaatgccagtagtggcagcgggggctgggtaggtgagcaggttcttatgtcactggtcagctggagtggtatgggcaatggcaatagtggtggtttgattaccttctgggtccctatctgygtgggctggtgatggtggtggctgcgatactggtkgtggctgcaatacagggtcacccccaacagccccagacatgttgctaccaggcttttctgcygtctatagcagcaatgctgccatgctatacagagtggtgtatgggccctgcctttgcatgtgagccttagcatggaggccatgctgccagtgggatttcagtcaccactctctgccccggataggtagccctccagcttgcctggcccagcctccggtgatagcaggagcaagtgtacagagcagggggaagggtaccatgctctgtgtgagagcttgatcacagaggctgctccaccagtaggagaagagttcactcttcctttgcaaagccaagcacagggtttgtgaattgctgggcttggagtcatttctcacagccccagacagggagctctcagacactgtagagtgtgcttcagtttcctttgtcccaggtactgcctttcagcgcactgcaccatttttttcctggggagtagtataccctgtgggttaaagcactttggacccagccagtgctgtgccaccacagccattcaggtcttgggggatggtgaatgacccaggatgagtttcctgtctggtgcagtgcctgcccttgcagggtttccagatctccacctgcgctagtgtcagggttcatgtaagtagaggagctctcttgtggttcatatcgcaacagtccattgcagagacgtggactgctgaagctcttttacttaccgttttcctgtaatagggagtccctcggggctcttggttgatcttggttaagctggctgcttcctttcttctctttctatgcctctggtgtttgctgtgaattcacccttggactctagtgttctcttctatttgaggtatttttattcctaattttggctcttctttctggagagggtggctgtctggtatctgtcgtcagccattttcaaccaggtaactgagttttgaccaagttggtgaaaatttaatataagttgttatagtgttaggactgctgagatcaaatgcagtgttgtgtcacttaatgttaagcaattgcgtcattgttctaacatcatagagtgtacttacacaaacctgaatctaggctatattgccatagtctattgctcctaggctataaacctatacaacatgttactatactgaatactgtaggcagttgtaacacaatggtaagtatttgtgtttctaaacatatctaaacctagaaaaggtacaatattaaatacaatataaaagataaaaaatggcacacctgtatagggccacttaccataaatggagcttgtgagtctggaaattgctctggatgagtcggtgagtgaatgtgaaggcccaggacattactgtacactgctgtagacttgataaacactgtattcttagggtacactaaacttataaaaaatatttttcttcaataataaatcarcttcagcttactgtaacatttttactttacaaacttaaatttctaaaaaactttctgactcttgtaataatactcgaaacagcaacacattatacagctgtacaaaaatattttttcctgatattcttattttataagctttttttctattaattaaaaawwtttttttttttaccttttaactcttttctaaaaaaggaagacatgggggctgggcgcagtggctcatgcctgtaattccagcactttgggaggccaaggcgagcacatcacttgagcccggaagttcaagaccagcctgggtaatatggcaagactccttctctgcaaaaaatagaaaaatcagttgggcatggtggtgtgcacctgtagtcccatctacttaggaggctgaggtgggagagtcgattgagcctggaagattgagggtgcagtgagtcgtgatggcaccactgcactacagcctaggcgacagaaaaaccctatattaaaaaacaaacaaacaaaaaaaacaacgaagacatgatcacacacattagcctgggcctttcctaagccttcacattcactcatttgataytactgtgctgtgtggtttggatatatgagccctccagacctcatgttgaaatttgatccccagtgttggaggagaggcctcatgggaagtatttgggccatggaggtagatccctcgtgaatagattaatgctattccttggaggtgaggagtgagtgaattctcagtcttaattcccacaatatctggttgttaaaatgagtctggccccttccccttctttctcttgcttcctcttttgccctgtgatctctgcacgtgctggctccccttcactttctgccgtgagaggaagcagcctgaggccctcagaaaatgcattggtgctagtgccatgcttcttgtgtagcttgcagaactgcgagccaaataaacctctattctttataaattatccagccttgggtattcctttatagcaacactaaatggtagtccatttagacacactgtctttcacttctacatcttgtctcactggaaaggtcttcaggggcaattaacaggcatggagccataatgtcttaagataacaatgctttcttctggaatacctcctgaaggacctgcctggggtttttttatagcttacttttctttatcaatagaaggattatactctatttactctaaaaatatagtaaatccataaactagtagcggagttgttttattttcattagcaagtattatgtgctgtacataattgttgtgtgctacacttttatttgactagcagtgcagtaggtttgtttataccagcatcaccacaaacatgaataatgcattgtgctgtgacattactaggtgactggaatttttcagttccgtgatgatctcatgggaccagtgttgtatatgcagcctgtcattgactgaaatgtcattatgcagtgcatggcggtagtatgtctagctgttaaacgtctcttgtgctcctagacttcagttttattattagaaaggaccttactaataatttaatttaactctattaacattttatagatggaaaaatcgaggttcaaagaggataagtgacttgcccagggttctctaggttgttagcaactctargactagaatcagttttccagctaaatctaatgttcttcccacactatgtcacaccttcctcccttcagtctcgttccttggtggcctcctgtcttcttcatagcagtcatagttatcagaagggattctcataactccatttgtatccattttatttaccccggcaactgcttccctatctcctatgttgctagctgataggcactggcatgtagtaaaaacagggaatcgccatatttcctagtcctcagaggctattttataatcttaacatttctgttaagattagaggcttaacatttctgttttagattcacacgagaagaatcattgagaagccactattcttgaatctggagaactcaggagagatcagatcagtcctattaggttaggtccatcctggaatgtttgttaactggctctaaggggcatttgttctgtggatggattgggatggaaccagtttttggggtctttcctgattgagatccacctgactagtgctgtttcatcaaataagcctccagagaaagaaaagtaaagtgataccttgacatatctttaacatgttttagtttaatgggataagatctgtttttagatataaggatttgtgaattgaacagaattatagttgaaagcaaagggatgagaggatttttatatagcaacaatgatagtatgaaatccatgctattgcaaggacaactgtgttatgcttatgtttgtgcctgtctcttctactagactgaagagggcagacaccatgtcttatttaattttatatctccaatgtatatctccttgtagacaataaagtatggttggttgaatcaagaatcttttcttctttaaaattcaagactgatgttaaatattttgagccttcttgcggttattcatctttctgaagctgtcctccaggttatctccagattatttacctctctgtgaagtgtaagctaactgcctctacattttgttatcagtcaggtagcaggcatatactatgtttacaatgttgtattgtaatattaggtgccattgtggcgagtgtgattatgatcaatttagtggggatgagataagagagaaatactcagaacaacttaaagaggaagttcttacattaaaagtttagaatttagaaaaacatactaatacttgcaaatagttacagaagtatttaacaagcagaaatggaactcctcattaccagtttaatctctaacagcattctaggcactataaagaaacagtcctcatcccatctcggttgacttttattatttacacttttatctcatagtcagctttctggatatttaaagagagaataacactagatttaggccgggagcagtgacttacgcctgtaatcccagcactttgggaggccaaggtgggcaaatcactggggcccaggagtttgagaccagcctggccaacatggtgaaaccctgtctctaccaaaaaatacgaaaattagccrggcatggtggcgtgtacctgtagtcccagctactcgggaggctgagatggaagattcacttgaacctggaaggtggaggttgcagtgagctgagattgtgccactgcactccagcctgggtggcagagtgagacctgtctcaaaaaaaaaaamaaacaaaaaaaacccacaacaacaacaaaaaaccccactagatttaatctatacagctgattccaggccaacagaaggacctttagttctggaaatggaaagtttctgttaaagatcaactggaaatttcttaaaatttcttcccagcaacaacctggggggaaccagtggaatttggaattagatttgacagttccttagtacatattctttaaataaagaagaaagggaattagttcatataattctcctaccacctttatttttttgttgttgtgctttatctgtctgtctatctatctaaacgaggctctttctaccatccagggaaacttctttcaatttattcttttatatatatatataaaacaaaatgtagaggcacttagcttacacttcaaagagagttaaataatctggagataacctggaggacagcttcagaaagataaatatataaatataaatataaatatatatatttatataaaatatatttatataaatatatataaatatatttatatgaatatatataaattataatttatataatttttatatgtaatatatataaattatattatatatatttatatattatrtaaatataatatatatatttttggatatatatatcctatatatataaaatatatatataatatatatataaataatatatatatatttttttggagatggtctctgtcatccaggctggagtgcagtgatgcaataatagcttactgcatccttgaactcctgggttcaagcagtcttctgcttggaatatctaggaattctctggaatatctaggactataggcatgcaccaccatgcccagctaatttttaaatttttttttgtagtgatggggtctggctgtgctgcccaggctgatctccaactcttaggctcaagtgatcctcctgcgttggcctcccaaagtgctgggattacaggtgtgagcccctgtgtctggctgagcctggtacttttagaaagagattacaggctgggcgcggtggctcatgcctgtaatcccagcactttgggaggccgaggcagcagatcacctgaggtcaggagtccgagaccagcctggccaacatggtgaaaccccgtctctactaaaaaataaaaagtatctgggcgtggtggcagtcaccttgatcccagctacttgggaggcagcagcaggagaatcgtttgaacccgggaggcagaggctgcagtgagccgacatcgagccattgcactcaagcctgggggacaagagcaagacttttctcaaaaaaaaaaagaaaaaaaaaaggaaaagaaaaagagaatgtaactttaaaaatcaaggtctgcatttctttcttcaacaaaatatcttgtacttgaaattatttatatagtccttataagattatctacttgtttctgattatacactttaatctcatcttctgtattatgctgacagcatcttcaccacaagggacttgccttattttccagttcatacaaagaaggcactagggataaggctttaaagatactcaaagtcctttgcctcttgaaacttatagaggaatagagagagttaacataaaaataatttcagtgataattgctatgaaggaaaaaaaaaaggaagagtaacagtttgggagatagaaagtattgagagtgctcttttggatagtggatgggatgccctttctggggaagtgatatttaagcagaaatttgaatgaaaaggtttagagaagagtgtttcactgaaaggagttgctctgtaagggctctgaggcattgaactagcttggtgtgttcatggaacatttatctttgtatcaccagacttagcagttgtttcactcagagtttgttcaattgaataacctgtacctgactccccgtatgtctaataccatgcctttgtttattagtttgttgtttccaaagtaaagtgaactgggctttatataaattagcccatgacacaggtctcataagtatgatgccctattaacttgtgcaaatcacatttttatgaaagttgtaatccttatttaatgtctcatgttgtttagtcatgccattttggatacatacacgtgtgtgggtgggtgtgtgtgtgtgtgcgcgcacacacgcagtgggtctgctaccacagtgttggttccaacttgatcagctctcgtctataatgaatgctagacatacagcaaattaaaactaaattaaaaactattgctagtgactaatgaccaaatactgttcagtctgctcccagggcatcattatagctgtgcttgaataattgaagaataaactcactgattgcctaatacatctgtagatttgcccagagaccttaagttgaagtgactctgaagtggcgcttgtagttagccccaggcactgcatgttggcacgcctcattgatttgctaaactgtattgttctaggtaggaattaatgtcaaaattaaataattgaacttgtgtgtatgtgtttgtataacagttccataccagaaaaccaaattttatactctacttggctgagttaagttttagtaatttgtttgaggcattcttagaataagcacaaaacctattaagaaatttctcttagagaggtaggcttgcttggtaaatctcagtgagtttcatatagacttcattattgtttttaaaatcaaccatgcaggcttggcccttactgctcactgaactggatacctactgtttttccactagatctgtatctaatttatggtaaaaggaccacaaaaaattatttctattttggcacctaacactattatagttaagggtcttttggcatttccattaaaacgttttcttagagaagtttataacttggcagttttacttggctttgggctgaaacattgctgtttttgtccaaaagcaaattcttccatcaaatttcatataactgaaattgccttggtttataatgtgtggagggggaagggctatcagaataggtctttttttgatactctcacaagtgcttcrattatacagtagtcttgtatgtgatatttattcttatgttttattcttacctcagtaagaatttatttttgttacacacaatgartaagttctggagagctgttgtataacatagtgcctgtagttaacaatatcgtgttgagtattaaaaatttgttaagaaggtagataccaggataggtgttcttaccacaaagcaaccaccaccaccacatttggggcatgaggaaacttttggaggtgatggaaatgtttattaccttgaatgtggtggtggttttatgggtatttgcatatgtccaaactcaccaaattgtatactttaaatatgtgcagtatatcaattatacctcaataaggctgtttaagaaaatttttaaaaatgatttgaaatattttggtaaaataattcatctccatgggttcctgtctttaaagagttatagtactattatgtattttaaagttacttttggccaggcgtgatggctcatgtctgtaatcccagcacttygggaggctgaggtgggcagatcacctgagatcaagagtttgagaccagcctggccaacatggtgaaaccccatttctactaaaaaaatataaaaattagccgggtgtggtggtgcttgcctctaatcccagctactcaggaggctgaggcaggagaatcgcttgaacttgggaggctgaggtcgcagtgagccaagattgcacagtctactccagcctgggcgacagagcaagactctgtctcaaaaaataaataaataaataaatttttaaaaacttactttttaattagcaactgctgttatttattataaaatttaaagtacttagtgcgttgactattatatgaaaggcttgaattacattatcttaaaaaaattaaataaaataagactttccttggtctgacttgctattatttaaaactttagtaactcttataattaaagtataccttactttgagggacaaatccatttccttagaaatgagttaagattcatcagtactagtacacagaactgggtcaattatgttagccatttacattttcccataattttacttatcactctgtatccataaagtatcctttctgtctctggagaatatctttagcctgggattttctacagtttgcacaagtagttcagaaatgtttggtaaataaattccaagggtttctttgaaattagtcctgaagaagaggtgcccataaaaatctctttttacattctttggcatgcctaagactgccttgcaacagttgtcatagacartaattcatatataaggtgttaagttcttaacacattcaaagaagactgstgactcactgcccaagataacatggttgaggcagctccagcagtttgtcgcctaagaaaattacagaagaatgtgttagagaaggcaaggtgatcacttttacagtattttttattattgctctcattatttattgttagtaataattactattattgccaacaacaagctactttatttctaaaaatttacttttgcagtttgcaattcctttatctccagacctgaaggccaaattttaattgcactgtaatttccaatcaagtaaccatgacaccagctgttcttgccaggctctattctgtggtagagggggaacctgtgttctctttacatggttatgctggaaagtatatggataaggcaggggtcctgcctgaagtaatcccagggtatttttaatgtcctttaattgccattcaggatgtaagtcagacacaattgggtctggtcacagtttaggactactgagccctgtttatataaaggtgaatttagcaaataaatctgaagctattacttatgtacaatttatttttctttaacatctattgatttctaagcaatgtgaaactagttccagtatactctatgtattatatgtcttcattttgttttgtttgtgatccytggatagcattggcagtgaggtgggaggaggagatgtaattgagaatttgacaagggccttgctaccataatcaaactgaaaccttatcagacttatttgaagttttcaagaagtccgattttcttgaggtttgataatgttaacagatgaaaagtatatgacgttaagttttaagtctgtctttctatgtatttgccataaaattctgttttgcattgcttgggtgatgtagttgtgaacattttaaatttacatgcaaatttcatagtagtcatctttccttcaggtccaaggaaagtatggcagcagatatgccttctktcttttgccttggagggattttgacctgacctgaaggtagaagattgttgtttttttgcatttagcttaggttacctacagggataggaaagatgtggatttcttttaaaagagtactaagaattttaacattagtatctgacatctttttgctttgagttattattgactgttagttttggttatcataattgtttatctactacagcctctaggaggacattgtacctagggagattttaaaaaatcaaacttagtatgaggccagaatacgaataattttatcattaattacatttcatttcccctaatgcttcttatgtgtgagagtagtacttgttcttaagtgaccaacatatttaatgtactatgtccatatattaaaagaatagaaactagtcttggcagacactgaaatagttaattggcttttacagccaagatagttttataaaactttgtgaaaattaagaaacgggaagaaaagtatttttctatgcactaatggcatattttattaaccctttaccttaggctataacatttttttttttgcagcattctttcattagataagcagctggaggaaggaggctagttagtttactgtaattgttaaatatctacaaacattcagatagttaaaataattatttccatataaaatcctgggtagaggtgaggtttttctaaaaataaatgataattttgagaaaggaataagagcagcgacataattctgactttgagacctgtaatctttgatagcaaactttttttgtttttttttgagacaaagtcttgstctgctgcccaggctggagttcagtggcgtgatctcagctcacggcaacctccgtctcttgggttcagatgattctcctgcctcttcctcccatgtagctgggattataggcatgagctaccatgcccggctaattttttatatttttactagagacatggtttcaccgtgttggccaggctggcctcgaactcctgacctcaggtgatctgcccacctcggtctctcaaagtgtcgggattataggtgtgagccatggcgcccagccgcagacttttaaatacagcatttagaaaggtttgatgacatcttatggtctttaattggactgaacttttacattcttattagtacacatataaaatcaacagcttttcatgattcggcatttacatcttaaatcctgcactttgctctgttaggaaatagagcaacactggatatttcaagctaataggaaaagtctacatttgatacagaaaagttaccttacgcaatattgaggagctagtgaacaagggttagggggtgggggtgccagagaccagagcatgcaagaatgagagagagattacattgtcctcttccattttagttggtagtttctactgaaaactgtaaagtttaactttttggaattgtaactatccmaagtgggaatgtaaactatattgaacaaaatttatttagcctgttaaaaagtcaacctaaaactatggttaattagtttatattattacatcacttttagtagagactcaacaatcagtgcagagtaagaggagctattatcaggtgagctgactgctacccatatggggctttaagataatgatgagtttaaatttcctcttagagctaagtgagaataaaactggaggcaataaatactcttggccaaagccattaaatgaaaaagctgggaattctccagctcttgacttaaattgtttgtttatcagctggcgcctagtctggagtcaagagctggagatttctatctgtgacagaactttgaaactcttgcaggacactttcatttcaacttaaggtaacttgagtttatagctttggctttaaagattactaatgatttactcatttccttaccatttaaccagagtggactttttcccaggaagggatctgtgtttatttagggcctttgtctgcggagggattaaaaggcagcccaccagcattgtgaacttgatggtcataaaaggtcaccaaaacacaccataaaaacattcttaccatggaattaattatacagtgtaattttacaaagcaacttggttactccatcttaccccctcccccatatttaaacatttcaacttttaaaaagtaaatctttggtataattttggtttatgaaaaaaatgttttgttttatgatgtttaaatgctgaggaaattgtcatgtgcatatgtacagtttaattgcttaaaaatcttaaaatttttgaaatgaaaatgatcatttattgttaaactgtgggatgaataacttgtttgggaggaggttagagtagtcagaagagttggttagtatttcatagaacagctcagtttccaaaaacctaagtccagctaagaatttatctgtgccaccaggtggcattgcatccaaacctgctaatgataaaaggattataaaatatattattttttgttaaagatataaagattttacttttgaagttgactgaaaactacatctgatatcaaggttaagtatctgcaaagaattgaaaagatttctaaactctaaatatttgtttttaggttgttgatattaaaacgaaagtaaatgaaaatgaaatatttggaggggattgctatttttcatttagtaaaataagcatttaacatttggcttttttttttttttttttttttttttttgcttgkctaaacactggagaggggaatccagcgtataaaaattctcacaaatatttcaaatccccgccccccaccatgtggcaagattccacccccctccctgggtcttgtaaaaaaaaaaaaaaaaaaagtgtcagcaggttttactgtatgggaatttttaaaaagagggagaaacctctgaaaggtgcaagttggtccttttcacaagcctaactatgagattcattaggcagttcatgttcatgtcttaaaagctgtttttgggaaagtaaattcttgagtttcctgtactgtttttcagggagtctttatagtcttttgaatcagctcattttaaaacagtgataatgtaaaaagcacaataaaaaaaggctcattataaattttataaaagtgtgatttttttcattaaaatacgtattcatgttctatttttatgaacccataaatataagttaataaactgtagcagaaacaattaaattacttaatacagctatccaggtgataggatatgttgtcagaataaataaagctcagtgtatattctattgatttttattcttttaaaaaatgtattcaccatgcagagtgatgtttaatgcttagctttgatcatttagcaaaaagcttagtgctactcattttatactcttgcctcttctgaggcttcttaatgtgcacaacctgttttaagaaatgtatatgttttcaaagtaaatgtttgacctcccaccttgatgttcccacttaaaagcaaaaccctcccctcccttatattttgaataacttgatgagaatgtgtgttgtactaaaactaaatatatgcacccttcagtattaccaaaagagaccttttggttttaaaaattaggaaatttcacttttgaaagtagtctagacaaaggtactcatgacatttgaccctgaaatttttacttttaaacttgatgcaacagtctgcttcttagctttgttgtatgctaatatttctacttatttaacatcaaaaagctgtagaggtttctctttatagattatgcctgtgttctggaattgcctcctgctgtccatgaattgcttcttggcttgttgtgttagaatttctcaccagggtcttttgtgagctatgtagccaacattaaaaaaaaaaaatcaaatttgatagagtaaactggactagtaaaaattatacttactattcataattataattgaggtttcttggctcagcatatcaattttatgcagtaagagtaagcacatacaaatctcatgtaatgatatgcatacatatagttgcctacaatgactgtttttctagttatttctataatattaaaatgatttttttgctgaaattccagaaatctaaaaacattgaaaaataatgataatgagaaaaacaattcttacttgttagggtatatgttatttagtaatgaagcatttagattttggattctctcatttcagttggaaatagtattggtgtaagtgagtgttgccatgggaacctccacatagatataaaaggcaatactgtctaagtggaggaggaggggcgatgtactgaaataccactggcctaaatgatctattttatgtatgtgtgttggtgtgggggtgagagctaggatgaaaaggggagagaaagtactacagaaagtaaatgttagcagtcaaagcaatttactcacacttttggattcttttagatagaagtgttttaaagctcgaaatgtgattcttaattattggtatcatttgcacacactggggagtctttgcatatcttatttttaatgtacagtggaatatgtttaacttacttggttttagataaaatttaatttagtgaaatttgagagttaggatttcagtctttgaaatggctttatacatgttattaaagatgttatatttaattctttttaaatatctgaaatttagaaaaactgattaggacacagttaatgtggctttcaaagaaaagctggcattttggctttatagtatttttaatactaratttttagtaattttctataaatatatagkcaaggaaacaatgacttactgtatctgcatgtgtaatattttatggttaaaaaaataaagaatgaaaacaacaaaacctaacataaaatctttttatatcccttaggagcacataaagattrtagagatagagatgattagagaacaaccaatttaactgcatgcaaagtaacatttttgttttttgtatgtttaggttacaaaaaaacaatgaaattgtgcccaacctgagttagcctggtaaaatgcagcagcatcatcattgcagttttaacactatggattctggttgtcagatacaaatataaaaaaaagaagagatattaactgacaaaaactgtttaaacttacctttttagtcaatccagagaaaaagctgccaaggtaataaaacatccagaagtttttaagttaaaacgagtaatttaaattaaaaggggtgagggggcatgagcaagcaagggagaagaaaaaaggggtgaaaacgacaggcactttgcttcctgggcctggctgtatctgatgtaaattaaccagcagtggggagtgtattgtttccaactccacataaacaatgctgggtatctctttgggaatgggtgggtgctgggatggatggaggttgttgagaagggaactggcaagcagagtttataatctattagtggattttttttggcatgcgaaacatagtaggaaagagtaaataatgagaaagtaygtttgcatgtaaaattgatcaagtgaaaccttaaaatgatgtgaaataattcataattgttagagaatgcttatttgtcagtaatcttcaggtttaaaaaawttttttttaaagactgacgccttgtaatgtaaaacgttcagcaatgaagatacccagttttaagtgtacttttggcatagtatatcagcttagctctaaacatggcttctaaaaactaaaagactaaggaaacttgtatttctttgaaaaataggtaacaagagggatgaaaagtcaagtttatttttaaaaataagagaatgaaagtaagagctacaacatccatgttgtttttctgtttcagtttttgcctgctgctttttcttccctgcactctttcttggaataaaatctgatagtcttaacggagtggaaagtgtgaaaatgcacacagccttatcaataagtagattcaaaacatctctaatcaccttaaagttttatagtgcagaattttctagaagtcaactgattaattaagtaccttttgtgtgtcagtttatcacactgggttgtttctgtattttaaaacatttcatccttatagcatccccatgaaatgcagattatcctctttttttttttttcagtgaggaagttgagtctcaggaaggcacaataggacaatatgcaattttaagaattagcctgatttagcaaaaataagacattttaggtagaggattttcartattattgcaggagactaatacattcaagtttggagtttctttgggttgctagaataactaaaaggctttggtttgtttcatttaaaaacaaaatagagaaaaatactttttcttgttctatcgatatcacaccattcaatgaccccactcccacacaatacccacaatcaaaatatagaaagaattattagctaaccaaaaaaagttcacataggtaatctaaagtaattttatttttggttttaagtgctttaatctagttaactaaaggaacaaaaagggcaaacatgtataaacaagtgaaaaccagaatttttaaccttctaacataatatccttcataggtcttttagcaattggattattaaaaagccagaataccttatttagttattaatcgtaatatgagtacacaggacagctttacgtattttcccctttaccttaaatttttaaatttttattttccaacattacccagttaaatgcacttttataactttttaaatacccaaaattgacctttacaaaatatcaatgagaatttcagtattcaacattaatcactgataagcttttttttagtacgtttatagtataggtatttaacgttaatacatgactaacagtgtatcaagcttattgcacaatcataataaaatacactattcagtgctaattaggcattgcaattatcatttggtgttgtactgaaagaattatattggtaactgatgcttttcatcttgttagtatttttaatccctctcaatatrtataatctttcagtagtttcatcaaaagaaatctgttccaacaactttaaacagaggaccttcaagagtgtgaggtgtgtgtaatagttttatcttgaagagaactcagtgaaagatactttctagattatgttaaaaagatccaatcaaccggcccatactcatcatgatttaacttttacagttttatacataggtttcattgaaggctgtaagaaaatctgatgtttataacattttcctttgccagtgtttgtctgaattttgcaaagatcaagtatccaaagtacgaaatgctagtgtatttttggaaaacaaaccaaaacccacttacccaatagattttacatattctaagaacgagaattcagtagtctggtaagtctggcttcataactcatagatttcttgcaccaaataagattgtcagcagtttggaaagaagagtaaagaagaggctcttcttcttacattggtgtgttcaaaagtaaaatataaaccagtatttttgttactatagcttagagcactaaagaagagccatctaccagtttccagattgttttagaagtagtgtctgaagaccttttcatttcaacttgttcttattctaaagattcctggctcgttatatactaaattgtttctagaaatgcttactagataggttgctgtgaaaggaaaggtttcgaaaaggatgagtagagaaaattacttttgaaaatatattctgaccctcacccttactgggataaagttccaagggaataaggattattgctagccagaaaattgcccaactagatagtgatgaaaactggagtttagccaactcttatttttgtgtgattttactcttttcctgtggttggttggmttggcaaagacctttagtgggttgtttgattatggcaggaccaaggtcaagtttagctttgcctgacttcaatgatgttatcttttcaaaccaaaatgccttatgataatgagattcttcatttaaaaaaaaaaagaacaattcttgatctttatgcatgttttgagtgatgkgttttttgaagatagaggctgtaactttaaaagggtagattgttatattctaggaagtatgctaagtgaacatatgacagtgttttcatgaaggagagatgrtatgggaaaaccatagcaataaaggtgaagaaaaataagaaatgtgaaagaagacccattctgtttttgttgtttaagggagagaactccctgaccccgtcaaaacattttagcatctgagaaataagaagttacttatctctgttayttcttccatatcccatagtaacttaaactttgatttttttttcccattggcaacaaaaatgtgatatagcattccttttacttatgtctgaattttgaattttttgtgtgattataagacaatatatacaattataaaggaccaacaaacatttacttacaattttccatgcaaaccttttttgaagaaaaaaaacttcccttaaaaaaaaactgaatgttttaaacaattggtatttggttttatttgtattattttactttctgttgttcagctgtaatcaatttttttttttttttttttttttttggagacagagtctcgctgtcacccaggctggagtgcagtggcgccatctgggctcactgcaagctccgcctcccgggttcacgccattctcctgcctcagcctccccagtagctgggactacaggtgccygccaccacgcccagctaattttttgtatttttagtagaggtggggtttcaccgtgttagccaggatsgtctcgatctcctgacctcgtgatcagcccgcctcggcctcccaaagtgctgggattacaggcgtgagccaccgcacccggccatcaatttttaaaactaattaaaaattgaaatacaaaggatttaaaacaaagtttgggaagggaaattgatctaattggctctgctatttttctgcattttctatagaaattcctttaaaaaatgttctttcattttaatccttctttaagttcaacctaaggaatgcatttgataaacttttttatttggatccaaaataacaactctgacggactaattggtacatacatcatatgtgaacacatttttgatatgatgtttgctttctgaaggggtccttaattattccctttccgtaacgaactaaaatttttgaatgggatcaatcacatatcattgtaagatgttctgcatttgacatagatgattatgttactgtatgtcgagtttgaattgtactcactttatgcctcttggtggtcatactttttcttttttttttcagtgctcactcagtacataaagcttgtatgggaaagaagtccttgtttcctgtctttgttggtatttgtaggttcctaatcttctaagagtcttgggatgtagatctgtacctcatgactagggttgggtagtttttatggtgaggaagaggggaaaagatagtattgaagcaattcctgtctaggtctgcaaagtgcagattgcatttctcttgcagtggtgttaggtatatggcccttttttgggaaagtgtttggagacctttatctttctctgttttgttgtggcagatggagttgtcctctggtatttttgctaggtatgataaatgttgtactaaaactgcttggtggaagtttattctggaaagattactgttcgtttcagtttcctgaagaaaatggaatcatagtattcaaaccattaagcaaacaagtccacaagcagaccagcaataataatgtgtacttctaattgatgcttgtgattcttattccttctttaaaacaaaggtttaggaataaaaaccaggattgattattagttttgtctaaaataaaacaaatggtagaaatagtcaaacatttttcttcataacttctagagagaaatatctagataatgaaggattgcccttattttataaaagaaaataaaagcaaagaagttatgtggttcttttatattccagaaataaaatgttcaattctcccattcatgtagcatagcaatctttagttttattctgattagtttgactaatagtatttttagataattgtgtacttctaatagcttttatgcagtctgtaatttatctacacttgtgttgaaagctgttagccaccacttacctactggatggaaataaatttttgattgattaaattctcccaacaaataaacttgttactaaaaacaagtaggagattctaatcacattgcttggcatttagagacagagtttctttcttctttcttgggtgattcccactgcagatgtgctttgacacaactgggagtaaatttatagcctgaactgagtctgtggggtgattcgcaaacttttattatcctccatctcagctatttgccattaatattttcttatactaatacaggtaatcaaaatttgatcttggatctgaaacgccctcttcaaattcctttatattttattttctatcttataggtattctttccttcagtagttaggagcaaaataagatagcagcagcatctgcagtcttaagcccctctttttattggtgttggaggaaagtagtgaactatgatcaaaacagtaagtggtcttagtggtatctggagtccactcatgtctttgactatgattatggcatctgagatacaggatgcaaaggagtctggtttgggggattctggtagtgcctcttatagtggtgtagcctctgtacccagcacattattctaagcctgaaaatacaggattattgactccgagcatcatgattgttttttttttttactgagtctatgggaagctcggagctacactttggtacccaataataatcatcgttttcccctggccttccctctttctgtgtggtttctattttcacttgtgtctttagcttaaaaaatatttatttagtccctactatctggtaggcactgagaatacaatggtatacatgagagacctgccttccttccttttagtgcttatagtgcatatgtttctgtcatcttacagattatctcaaaatcctttttggaagtaaatatatgaattatagggccatcaggtttttgtgctacgctgtctctttttaaaatctttctctatgtacttttattcctgccttaatttttattttctttgcttattttttccgattttttaataaaattaagactctctacatctactttttccttaacacttgccttaatatttaaaaaaagtttttattgcatatatatgcatatacacacttttttaaaaaacaaatgggatttttttgcaaattacttttttaaaatttcatatatcttttcatatatacagcttgagcatatgaaatctgaaatttgaaatgctccaaatctgaaactttttgagtactgacatgatgttcaaaggaaatgctcattggagcatttcagattttggatttttggatttgggatgctcagccagtaagtacaatgcagatattccaacatctgaaagaatctggaatccaaaacacttttggtcccaagcattttagataagggacattcagcctgtaataaatttactttatactttcaaattactacaaaatattttattttgtaggcagacttctgctattacagaggctactctgaatattcttgcagagatattttcatgtaaatgcaaatttatcagtaggagaaattttaagaaatgatatttctaggtcaaagagtatgtgtgttttaaattttggtagatgttgccagtcttttcatcaaagtttttacttccaccaacaatgtaggagaatgttgtggtccgaatgtatcccccagaattcatgtgttagaaacttaattcccagtgcaacagtsttgggaacttttgggaactgtttagatcatgagggctctgcccttgtgaatggattaataatgttagaaaagggcatggtggagggagtttggtcctttggtccttttttgcctttatgcccccttctgccatgtgaggacacagcatgcctcccctccagaggacacagcattcaaggtgccttcttggaggcagagctggaaccctcaccagacaacagacctgctggcaccttgacttggacttcttagtctcagaaatgtgagaaatacttttctgttctttataaattacccagtgtcagrtgttttgttgtaggagcacaaaaggaaaaagagcatttattcatacatttgcaacaatctgtttgggggaactgatacattatctttacatttcttttctagtctaataagaagtaaaaaatagtatagtgtggttttgattttcttttctttttttcctccaaattacgatcttgtttgagcattttaagaacatttattagccatttatttgcctttttaaaaagtgattgctaattcctgtcctttatgcgtaattttattagatttattcattcagcagctatttcttgagtacttacagtttgccaggcactgtgctaggcattgatcttttctaattggtatgtatgagtatcaaatgctcattcatttattcaataaatattatctgtcatataccaagtactagtctaggcctgggaatatagcggttcacacacacacacacacacacacacacacacacacacacacacacctgcccttatggaaattacactgtatttttatttatttatttattttgagacagagtctctttcgcctaggctggagtgcagtgtcacaatctaggctcactgccacggtctaggctcactgcaacctctgcctcccaggttcaaatgattctcatgcctcagcctcctgagtagctgggattacaggcacgtaccacaatgcctggctaatttttgtacttttcatagagacgggggttttgtcatgttggccaggctggtctcgaactcctgtcctccagcaatctgcccacctcagcctcccacagtgctgggattataggtgtgagccactgcgcctggctggaaattacattttaatgagtatgaatatgcgtggggagataaaaatgttgcaaatattttctgccagtttgtcctttctttattcagtttatgrtaatttttaaaatacagaagcttggaattatcrtacagttgagtgtatcagtcttctcctttatggcttctgagtttggtgtcctatccagaaaaggtttactgtcactaagtttgtaaaattaaaaagaaatttatgtacatcttcttttagttattttgtgatttcatttttaaaaacttaaattttttattcctttgcagtttattttagttgaaggggtgagcgtagaaatctagattactttttcttttaaaaatatatttaatgaaagtctgtttttttaccctaatttcaaatgccccattaatttcatacactcagttccagcatgtatttgggtctttttctgagctctctgttgatatctcattgttgagtgtttcctgagtaggacaactttccgttgctttattttactgtctggaagggtagttgtctttcattgctctttttccctcgctcagaattttttagactacttttgcttgtttattgttccaaagagacatgaaaatcattttatcatgttcctcccaaaacattgttaatatttttgttgggattgcactgaatttatggattaatttatggaaaattgatatatttacacaactaaatctttctatttaagaataagatatactcattgatttctttttgtgtgtctcttactaggactttaaagttttctttaggctgggtgcagtggctcacgcctgtaatcccagcactttgggaggccaaggcgggtggatcacctgaggtcagaagttcgagaccagcctgaccaatgtggtgaaacctcgtctctactaaaaatacaaaattagccaggcgtggtggctcatgtctgtaatcccagctattcgggaggctgaggcaggagaatcagttgaacccaggaggaggaggttgcagtgagctgagattgtgccactgcactccagccggggcaatgagcgaaactctgtttcagaaaaaaaamaaaaacaacaaaaacatctttatgtaacaccctaaacatttcttcaacagcttattccaaagtctttttatctttgttgttgctggtattattttatttatttatttatttatttatttatttattttttgagacggagtctcgctctgtcgcccaggctggagtgcagtggcgcaatctcggctcactgcaagctccgcctcccgggttcataccattctcctgtctctgttgctggtattgtaaactgactcctcttttattaaaaaaaaatttccatcgatgtttatacatatgagaggtattgatttctatatattaatttgaactctacttcctttttgaattctcttattctactagtttttcacttggttctctttgattttctaggtctaaaaatgatcattttgtgcctttttttcctaaatcatattgcctctttttgtaagttttatctctctttcttaactggttattaaacatttggttaatacttccagaataatattgaataatagtagtgataacaagtgtccttgtcatgttcctgacattaatgaaaatgcttttattgagttaatcttaaacacagtggtagctttggtttgaaggaggtttttgaaaaattatgttgaagaaatatctttttttttaaatgtatgtttgcattattcatttcctcaaccaatattatgtttctagtatgagtcagttactgcattggccctggaaagtgagcaatcagaataggcacaatccctgcccttggaacttacagtctgggggaactgatacaggttgattattgcttagccaaaatgcttgggacctgaagcgttttggattttggagtgtttgcagaatacatacccggatgagcatccctagtttgaaaatccaaaatgctttaaaatctaaatctttttgagggctgacatgatgctcagaggaagtgctcattggagcatttcggatttcagatttttggactggggatcctttcaacctgtattaatcatataatcataaaaactgtaccatattttgccctgtgctacagcagggttacattgaaccataggagtatttacctaaggtggattttcttggaggtcaggaaagtcttgttggaaaaagtaccattgattgtgaccttaaaggagagtatgagttaactaggcacagaggaagagcatgctgagcacctggtggcacattttaaacagggaagtatggtgttggatgaggctgaagagagaggttgggctggactatcaagacctttttcaccatgttactaattttgttcatatgctaagaacagtgggaagccattgaaagttttaagtaaggagacagcataatcagattaggatttctaaaagattatggtagctatagtgtggaaaacattttagagacagggtgtgagtaaaagctgggagacaagtgagaggcatttgtagtagtccaggcacacacggatggtagcttgagctagagatatagatatagagaaaagttgtcgcatgtttttttttgtttgttttcctaaaagtaccttaaatttaggctttacaagaagtcagcctataacattcaccaagaataactcataggatgaatggggccaggcgaaggtgtggcttttgggataaaaaataaccaagttggtctgagtactttttgttttattgkttttattctcatcctgctatttcttctcatctttcctattttggtttctgacctaaaaattcagtctcttttcttcagatagtctcttcgttatcttaaacattctttcatccagcaaacatttgagtacctcttgtatcatgcattctgctgagtgctgaggaaaaagataaatggaccctcagggacctcaagatcatcataatgtattaggtgagacagatgcatattcataaaaaacacattgcactaaatgtaacacacaaaatgaagctgttgatacatttgaggcatcatttggaagcctttctggaataggtgaggttcaaattatgttttaaaagattaatagagattttccaagtgaggaaggggaaggctgttttcaggcaaagggaatatagcatttacaaagatacagaaatgtgaaataacacaatgtttttgctgaaatatggaagtttgatatttctggattttggcatttctggttgtaaatggagaggaaagtgggaagagatgagattagctcgattgacaagacactcacatgaaggttcttctagaatcactgtattcagaaaagcatttacattgattgggggatataaaaggctagcatgagaaattaacatagcaatgtatttagattttagaagcccacaactccatttaaaagatgctgtttttacctaggttaacaagtaaattgttaaactaagtttcaaggggacagatttagttgtacttttagaaaatactgtctttataaatgccttacattgtgtgtatatgtaaatgcttgcagataaaataatgaaagttaaacaaaataatgaaagttcccacgctcttcactgaaggcagtcagaacttgtggtgggttaggtgataatttttttttttttttgagacggagtctcgctctgtcgcccaggctggagtgcagtggtgtgatttcggctcactgcaacctccgcctcccgggttcacaccattcttctacctcagcctcccgagtagctgggactacaggcacctgccacaacgcccggctaattttttgtatttttagtagagtcagggtttcactgtgttagccaggatggtctcgatctcctgacctcgtgatccgcctgccttggcctcccaaagtgctgggattacaggcgtgagccaccacgcccggccacaggtgataatcttaagtgagctgagagggctcaggtcctcaccaacttaaaatttacttctaaggagagacttggagagtctctgagattcgtagagtattttttaaatgatgttttgatcgtacccatttacctaattgaatttatatggtgcctcaatttagaaaaactgaaagctaaacttcaaattaaaaatgtaagacttagatgagaccatttgataccaaaatatgatggtatcagttaagttccttataaaaagaaaaatcaacttttctcttgcagtgttaatatttttcctgagatcctgtctcctgcctttaaccatttctctgttatttgagggagatattcaaggattgaagcgaacagagtccctcactgaaaggctggaaatataatttcacttaaccrtacctggtagtatcttcttaaatggtataagaaagtgcttttctaattcaaatgattcaaataatatttgctaatattatgaccaaactttgaagaaagtgatagttgtattttataggattaagtgagatccttatctgggactatgamgggattaacagataccttcagawtgctttacagctgaggtgtatgtagatagatgtagagctctaaagggattaggtgggtggtggttaagcaatagcagatgtcccttttaaaatcttcaaactagaggtctgttaagtacagtgcttattttttgctgacttggttccatgagaaaccttgatgttttttagtgcttctgaaagtatcaagaagaaactattcagatggtttggaaatttggggcctactctttttgctttgtaaaatggacagttttggataagcaggaaattctgactgatgggcagcagaacaattaattgcagtatagaagtgcattaggtatagtgaaaagagcacttacatgagaaatctgaactcagatctgagttcttttatttcctctatctgttgtgtgactttgggcaaattaacttttctgagtctcaacttttctgggtgtaaawaaaagtgatgggactgttggtgctgagtctaaatgcattgcttattttgagacttaaatgaaatgatgtaccattgaatctcttggagtgggcatattcctttctctaatgccatttttagggcctgactttttgtgaaaatcaaatgagattttggtgttttctttttttctcaccaaaatcctaacctcagggctgactttatcagaatgttctaatgtaatcattgtggaaagatacacattagtacttacttgagaatgttgtaacccaaatcagaactcttactctggttcacaaaacaggacttctagaactttgagaagaggcagtttggtgtgatgggacgatcacgggatttggattcaggactccantgtaggtcacttactagttgtatgacttgggtatgttcacatatacccaaaagtcaaccacagagtctttgccacagaaaaggttgctcagagaacataactctcttcattttatatacagagaagtatttccccaaattgcctttttactgattgtcttacaatcaagtacttgatttcagttttccttttagtttctaccatacatttgaagacagtggagttagaatcactttctctgatgcatagtgggcatatatcctagttatttaatrtctctgtgcctttctacatctgtaaaataggcattattatgtaacacatacctcaagggttgatttcttaagggtctagaaaagtgtctgatccacagtatgtactgaatagtgttaattactcctattgttattaaaatcactattggaattattaaggggaaaatgtgaatttctcatttagtcaataagaatttgagagctagcagcatagtttaaggataaattctagttactcgttttctacttacgtataaagatttgaaggaaaaggttttattcactataaaaattaaaacaaaaaaattaaggttttcctaattcaaatataagcattttagtgatttttaaaaatgtaatagaagcatacttacccttttttgttaatctgaatttttaagtggaaatataacatgctgataaaaccattttataacataaaaatacacattttcaatatacctatattacctaataatgccattcccacattttaaaattcattcctgtgggatagctatttgtccctgcaaatgcagatagttcctaattttcatacatattattcacatacttgagtgaaatagtttgctttcagttttaactagtataattttaaaaaactgtggtcgggtctctcaaaacataagagatactgattttaaaaagtggttacaaatgaggcatttgaaaagcaattcctaaacaattggattttaggggtttaaggccaagcatataggcactctactttttcatttctgatcaagaacagagttaaaaagtaaaaataattagagaatataacactttgtgcttttagagtattgattgctcagatggaattgaggaaattttagtaatttctagaagcaaaattatagagttagtaaaatcatcttagcagagaataagatggtttcatgatatattttaaaatactctatactgggccaggtgtggtggctcatccctgtaatcctagcactttgggaggctgaggcaggaggatcacttgaggccaggagttagagaacagcatgggcaacacagcaagaccttgcctctacaagcaatttttaaaatcttagctgggtgtggtggcatacacctgtagtccagctactcgggaggctgaggcaggaggatcacttgagcccaggagttagaggctacagtgagctatgatcatgccactgcattccatcctgggtgacagagtgagaccgtatctcttaaacaaaagaaaataaaaaataaaaactgtttaccaaaacttcttgccttgtatttatcctggacctcctttccttacacattttccaagttcacttagcaaatgaagcaaaccaaaaaaaccaacaaccctccattgtccataagctttaaacctgaaacatggttacatttgacttgtgcctggccagcagccttttcatttttttagttttgtaatcaacagttaactgttattttcagagtaaagatcctaaagatttgtgcattagaaacatttcttggggactgatgtccagatatcactgtgtaatccctattttagctaaatttctgttggtatttgtatcattgcatgattcataaacagacattacttattccctttctcttctaaactgctatactctactcatgttgtggaaactgctattttgaaagtgtaactactgatggactctttttctcttacctcctcagttgattaaaatgtctcattttatgatgaggttgcttgggtgagaatcttggaattacagctgtaccttggaattttttctcagttgtcttgaatggattagaaatggttaaatggcttcaaatactcatctcaaccttcaaatcactgatgggttaaaatgagttattgaaaaagaacgaaacctcctaattgtagcggtaaggcgagagggtataggcagtggggagaggaagtgcatgtgtttgggagtggcatgactagggctagagggtgcaggggaggggagaatgtagacaaggcagtgagctatctcacatgaactttacctaatgaaatttcttgtcacttcttttctttttatttaaaagtaggtattagtaaaagctactacagcattttctcctaataattcatttttttttgtccaatataacttgttataccagattttcctttcggtcattaagatttaaatttcatatttctggtagtaaaatcatctgtcaagtgtggggaatctgcagctttaacaccacttcatgtctgattagaaggttttcttttgcaattaattttcctctcagctctttgtggagaacagtagcccactgcagagaggttagaataccgtggactttggctgttcatctttaatgatacaaggaggtagcaaagcaagaataaatgaggtactttttggtgagcaaaaaatgtgaactgtcagtgtgagatcggttctaggagcagttagccagcagtaatagggcacacttgagtaattgaatttgcataacaaggcttgctgaagagatctgacaggcatagagatttgtctagctagagagctccagatggacgtgaccatgcagcagctgggtggcacgttgcgcagcatggacggcaccgcccagactggcagctggaccctggcgactgcagggctgtggcacgccagctggtggcttctgacagccagtggccctgttagagagcctttttataatggcctgtcagggtactgtacctgcagggactggcaggagaatgtcacaagtcaccagtgagggttgttaagctgaataaatctgtcccaggaaagtcgaggtggtcactgttggaaccacaaagctaacgcctcacagagtgatttccctccttttctaagagtgctgtcctcttttctttttgtctcctcctcctcctcctcctttttcttcttctctgtctctccccttccccttccccttccccttcatttctggtcaagaacagagttaaaaagtaaaaataattagagaatataacactttatgcttttagagtgttgattgctcagatggaattgaggaaattttaatttctagaagcaaaattatagttagtaaaatcgtcttagcagagaataagatggtttcatgatatattttattcatgaaaccatctttaatcaaccccttcccctccctccctcccttccttccttctttccttccttccttctctctctccctgtctctctttctctctttctttttttccacattgctctacactgcagtygctctggattattgtaatattcttaaaaccttgaaacccagttgccaaacttcctgagagctcatgtagactatcagttggaatggaaagaatgttcctttttgtgttttccttctgtttttgcatatttgcmacaagggcatatttgcttttgtagaaattggtgataatctaataatttatattgaatgtattgttcatagggaaaaaacatttttaaagaataaattgcagagaaaatgmgtgaactgatgtgaagtcagtttgttaagtcacctcccccttcacgtccaggtggactgaatttatgtggaggaattacataaccacctatcttcttagattagaatagaatagcatggaagaaggccagctttctgcctgctgttaataaagtttacatctgtgttcttaaattgagaattttgccatcttataacattttctccaaaaaaatttaaaaaaaaatcatgtacctagaaaatacaaccatttttaagggcaggaaaactctagattcatttttcagtaaacagaaaacttaaatgttacaagccccaaactcactcacttttaggacaaccaaaatctggtgaaaccaatttatacacttcctttgagtgtgtgtcattgacatttgatctgtttctctttgaatcgtcttacaaatgctttttactttttcattcttttcctaattatttctcatatcatcccagtgaattagacagggtaaataatatcttcattttgatgagatgaaatgtgagccacaatgaaggcaaatatatgtagtgtctcctggctaatctggggccacccagtctttgtggcagtcaggatggttctgaaaagttattatgtttaaccctcagattggcaaagatacaaaagtctagtcytagcatagatagggaagatgtgtagcctcatagactgctttggtgatgtaagttatttgaaccaactcagagaacagtttggtagtatgcatcaaaaacttttatacatacacacacgtgtgtgcatatacatacacatacatacacacgtgtgtatatatgcacacgtgtgtgcacatgsaaatatacacacgtacttttatacatacatatgtgtgtgcatatatacacacatatatacatatataaaaaacatgcacacctgtatgtatgtataaaagctctatatttataggtctataaatttacctagtaatttatgtatgtatatttttacaaatatatataatttaccaagtaattccactttaagaatttatccccccagagtaagartatgtgtaaagatttaactataagaatgtacttttagcattgttaagaacattggttctcagtgtaccctccatggatccctaggaggccataaagtgaaaattatttttctaataatagagtaataatactcatggtgcaaaaggaatggtgagtaaarctgctgcccttagcaagagtcaagacagtggtatcgtattcttaacagctacacataaagcattccacttaatgttccttgatgaagcattaaaaattattaattttattaaatcttaatgttgagtacatgtcttttgtatattttatttgatgtaatggaaaatatgccccaaacgatcctgctacagttggtattggggttgtcttgagaagtatttaggtgattgtttgagttgccagctatactatctgcatttttgtggaacaccatttttatttcaaagaataacaagacatcttatagaaagaaaaaagtgagtcttacttcaaggaaagcaactgagggtatttgtaaccaatgataaaactggatctttcaagtaaaaattagaattttggaaaacttgtatctgaccatatgaacttaacaactttctaatccttaaagacttttgtgaaaagattgttggtgcagttaaagaatgtgagtttctgttactgtatactgggaatttagaatatctgcataactaactgaacsagtattttccaattgaccgttgtatgatgttaccaaattatgcctagataaaagatgcaaagtacaaaatagagggatagattttaatgtaacatagtataaaaagttctttccacattgcaacaagcctttaagaaaccaccatttgtcargtttgggtttaatataaaagaaggatatccacaattatctgaaaaagttattaaaattctctcttacttttttaaactgcattatctatatgaggtcagcttttcttaatttcaaccaaaacaacatatatctgcttctgcatttaatctactatgaaaatccagctgtcttctattaagccagaactaaagagatttgaaaaattgtcaagcartgctactcttctcactaaattttgttgcttgttatttttcccaaaatatgttaatatgtattaggtttatgattgatgtttttaagtcaattgagaaatgtttttaaaatttgttttgatttctaatacagtaaataccaatagatataatccacataaacaaaagcttttgtgtcctcaaaaatatttaaagagtataaagaaatcctaagaccaaaaagkttaagaaccactggtttaaaatgatgaggccttggaaataacccaaatgtccaataagggagaattgattaaattacatattatgaatcagtgatgtagataaatatctgacatgaaaatattttacagtgttgtgttagtagtaaaagcaggttttgaaacaatacatgaattaatgtcacaaaaagttattaatatataatatgcttaatattgtattctataatacctaggtattaggtagctttttcttgaaaaggaaggtagaaaaagttgtcataacagtattagactgcatcatgagatactgtttccttctggcttttggtgaaggtatttgctttttactagttttgtaacattggccaagtctgaattttgttctccttactttaaaaatcagatcaaggttgttaacagagtaagctgttcaatgtattttacttccctctaacatctccttagcttttaaaattctgtataatagcggtgtatctgtgacaattaatgcttaataaagcttcccttgaagtcaaaataagggtcttttgaaaacaagaacacatcttgtaaatatcatcttatttctgtgaaaaaaaagttttgtggaataatagctgtaatacagaaagtaaattatcatcatgcagatgcttattggtaaagataggtaaggtagcttatgattatacactaagtactaggccaggtattttataaaattgctgagtactttacagacatcatctcatttaatcctcacaaaagccctgtgaggtcagtactgttgttatccccattttactgatgtggaaatggtctcataaagaggttaaagaatttgtcctactcatttgtagaggtagagctaattcagacatgagcctggctgactgtaaggtttgtgctttttatccatataataatctccaaccaaagagaaatgaaaaaccaccatacggacacaaagagcagctcgcccagcttcttactctgggaaaccagattgattttgaggtggggagaagcctggataaagtcccatacacttagatctctaggccataaagattcattccacagcattcaattagaataatgtaaatatgtaaaacccagtgcctggtatatcataattatttagtaagtgggagtgaactattacaataattctacgactaagccagaaattaggttcctgttcataaaataggaaaagaaaaaaattcccatagtcccacaatcccttacttgaaactcttggagtcatgtgagttttgttttagaattatagcaaggtaatatgtatatttaccatatgcwatgtaacatccccagcagagaccagggcagccccctgtaatcaaaacaccaacaatttctgcaatgaaatatatgaatattcacactaagcagaagaaatgaagactatagccttaaatcagttcaggtaaagttttgctgccaaatgagtgaagaaaaactcttttgcatttcagagcttattgtataagagttgaagggaagggattgtgtacttgtaaagcatacaacaacatttcaaggagaataaagaagcaattactttactaagttgaatagacaagtgatagttctgttcaaaagagactgttaatcctaagtcaaagcatgargtctttttggcctctgatttcaaatgctaataattacatccaaagagagaaaacaagcatctcttattttatcttctttcaaataagtatgcgtcactttaaatgaagttggggactaaaatcaagtactatattttttttctagaggatctgtgtttatcaaagaaaacacaagaagctaaatccatttgaattgggttttttttttgtagattcctttttgtaatagaatctcatttttttaaaatgagaatggaaaaatgatattctgtatggtggtctttaagtgctgaaggatccacagagtsttctgaactttgaaagaaactaagtttggccactcctgagcaaaagtaatctagaaaaagcgataagtatataaggtgatggatatgttaattagcttgatttaatcattgcacaatgtatacatttatcgaaatatgttgtatatcataaatctataaaatttttatcaattaaaccttaataaatttggaggagaaaaggaaatctaccttccatccttccgtaaaaggaattgaataattctaaaggaagggaatttcaaattttaggaagataagcaattatagttgatggcagtacctgttgtagataaaactgaagcagaataattaaacacctgcttctttatctctaccctcttcatgtcctagcttccttccctactggtttatattccaccgtacatgattacacatcctcagcttcctcgttcttccttcctctattgaatttgaccccacccctggtcaaatccaactgttcatttgctctgcattggcccttgagtagctgaacatggttggagtaaatggatgaccatgttggtctggcttgaattttaaattaatgatcactaatcccargttggcccttagggctgcttgacagttccccttcatttccttagtccattcattcttttccatcacctaaacaattatttcacaccttctcttgtctctatgcctctggtatcctcacgcagtgtcagctgatgacctttcctttttactttcactgagaatagacacagtcgtgaaagaacttccacatgatcgcctaccccttaacctgcatgcatttgtatgcatgtactctgcctatcctcctgttagaattggccaagcagcagtggtctctgaagtcagcctttctacttctgctttgatctccacctctcttaccttcttccccattaaatcaatttctaggagttgttccttaatasgtagttgagattgagaaccactctgctagaatgtaaactccacagaccaaagatttgttctcttgctcattgctgtattctcaatgcctgtaacaatacataatcmaatagtaggcactcagtcttgtgtttaatggatagatgagtgaatggataaatgaacaaatgaatctttctggtaaaaaagatataaattgcagtacaagctctgaagagcttaataaataatctttccttgtgttttatgatcaaattggagctaaactgttcatcttacaatgttcatttaaagagttttctgctgatttactgtaactatcctcacctgaaaacttttcctagcatttttatgcacacagtcctagttatctggatttttgttgttgttgttgttattgggaactgagatttttctgatttctaagtggttaagctttgcttttcaaatgaatttctctggtggcagtttcacaagtgaatagatctgtacaaatccagaactgttcattttactcattactgctacttggaagacctgagttcaactgcctgctccatcactttttctcactgaagtgaatctgggcatgattcttgtattgagaaatgcctagtatagtctcaatataattgattgcatttctttcattaaaatcaggggaarcatgtttgtttccttgacacctgtgtttcatgaaaaatcgtagaaaacagccacatgtattttaatttagttctatatctcttttcccttaatcctaatttgtagaagtgtggctgttcaaacagactctcatgtattttgaaatacatgcagtgcsgtttttgtatgggagcaagtactatggattttcttgggctataacttagtagcatggcagtaggttatagaaccagtccatgaatcctgcagttcttactaatgtgagtcaaatggtattatggtaaagatacctcgctgcttttttggtggctgtgtttttatttgtaggacaaccctaaaatagaactcagctaggtcatttctaaacgtaatgttgtggtggataccccagaacaaacaccattaatgtggttagtcatttacttggaaagctattgccagggcaaactcagagccactagagacagaaagcacataagtaaacctgcttgttaaagtggagatacagagtaactcagcaatgtaataatacgaagtaatggttaagtattcagtttatagaaatttgactcagatgtttcaataaaatatctgtttttgtaaatcaaaagataacyaccttcattggtatttgggaccaaagtttttcctccttcactttctgcccttttggaagacacagtaaaaatagaattcatgaaacatttctaaataatgggtgtatagagattctctttatgtgtggtatcagtgctctgctatgtaattatttgttatattttaaatttcaatttatgtgttctctcttgcccccttcagccccgtgccacataatttttgtttttggtggaaccattcagccttaaatacttttagtatatatcgtctgagaatagggacataactccaaaactactatcacacccaagaaatttgactttgattcagtgccatctaatatataacccatattcaaattttctcagttgtcccccaaataactggattttctaattttctttgatccagcatctaataaaagttcatatgttacatttagttgttctgtttcttcatctttctttaatctaaaacagttcccatgccctccctttaaaaataaaaataatctatcttgacatttctggagtctagaccagttattttatgaaatgttcctcattcttgatttgtctgattattttcttactgttaattttaggttaaatctttctggttaccatatagagtctgattattttttaagaagtgtagtattcagttatagagaatcttgacttgttctgcctgcttgcacctgcttttcttagagtcctaacctctcaactcaggtgcaaggaagcagagtttgactacttttgtgggtactgaagacctagcttattgtaacaacaamaaaaaatgtggttttatttttagtaaaaatcagtgtccaatatgcgctctaaatataatctggttatttttgaaatttatgttaagaagtaagaatttggctgggcgcggtggctcacatctgtaatcctggcacttcaggaggccgagacaggcggattgcctgagttccggagtttgagactagcctaggcaacatggtgaaaccctgtctctactaaaatacaaaaaaaatcagccaggtgtggtggtgggcgcctgtaatctcagctatcaggagtctgaggcatgagaattgcttgaacctgggaggcggaggttgcagtgagctgagatcgtgccactgcactccagcttgcgcaacaaagcgaaactgtctcaaaaaaaaaaaaatctaaacattgaactttagaaccaaaatgaaatcttactgtaaccctaatgtacaatactaagaaaacaaatattttcattgacatattgaacttataaaataatgtatcttcaaaaaaaagattctcttagttttaacaaatattcatgcttaagtaatgtcttcagctccacattttcagaaccctattaactctcacttagcaaaattagcatactgaactctctaaactatttaatgatttgatttatatatgttcattctaatgaacaatggatgctaataacagtattctgtgaggagtaaggttttttttgaggtcagcagtgtttagattaatcaggttgacatttcttgctggtgggtcatgaactgttgataatagcattaaatggtgattcagttgttgcagaaggtacaactcattatccagctactatattaaatcattacagaaacaattggcactccacacccatgtgttctgcagcaatggtacatcagggaagtatatttgtttcttttatttacatctcaaatttttttggaggcttacctacattcttaaaggatgctacagcattgccactactttagggaacgaggatgattatcttgactgatttggggggatgaagggatatataatccttttaataacacacccaaagtcttctctttatattgcgagcctttctgaaaccttgttttcataatgagtgtacctgggttgcaagtaataaaaacaaatatatttatggatttttaaattgggtttaaatttaacataaattattattacaaggatatgggtcttttaaaaagatttgtattcattttaagagagaaatgatgcttggccaggcacagtggctcatgccggtaatcccagcactttgggaggccgaggtcggcagatcacctgaggtcaggagttcaagaccagcatggccaacatggagaaaccccatctccactaaaaataaaaaataagtcaggtgtggtggcgcatgcctgtaatcccagctacctgggaggatgaggtaggagaattgcttgaacccrggaggcggaggttgtggtgagccgaaatcatgccactgcccttcagcctgggcaacaagagcgaaactccatctcaaaaaaaaaaaaaaraagagaaatgatgcttggaaagttcacaaatgtgctgtagaagtaatttcttccgaaaggtcattgttatagaaatctctttaagaaaaatttaagagatgagctggatttgttttttacagttgttaatctattgccttttaagataaaccttagtaatttggtatgcattgaatcagaaattgttggtgtctttgaattttaaaatcaagtatgttttcagtgtgtcccgtgtgtataggcagtgaatagatagtagcatgacaattgtattaatgttgatttcatttcttattggatagtaaagaattagtgaagtcagtttctaattattaataaaataccccaaacacccagccccacggtttcacaaataggtgctcgatcataatttgttaatgaatgtgtgacacttgggtagaagcaggagagctttttggcattttgtatttgccagaatatactttaaggagctaagtataggaaaaaggaatatttccctttataatgaaaaggaatattaacatcttcaaagtaattgccttatttagggtaaataggttcttcaaatctatgctgactctttaagagaaacaatatagcattggaaaattatgggccactagaggtcactgtttagtaatcaacttttaatgaaccagaacagtcaggagagccaataaattacagtgtggatttttctaattatgaattcatatttaatcattcaatgacaagttaactttggaaatggttttgtgtactttgcatatgtggttatgctaatgcactattatatttctctgatgttggccctccatcattagaatagaacattgccaaaggctttgttatataatcttaattactaattatgagacataattaaccttgttaccgcctccacatccacacagtttttggaaataaagttttactctaaataacaattacttttaagtgaacataggtgtaatggttatgatcagttcctcctcctccctcatgtcttgtcttcctgcttcattcttggtttccgttgctcccatccctttctctgctgtcttatttctttccttccctcctttggattccttttccactttattttgtcagtgattgaatgtttcttctcaagctttccagccttgattcaatgagtagaagaatgtgacttttactgcatatgttaaagtaatcctagggtgggcaacttgagctgagccaaccagcagtgcaaaggaagattgtatgcatataagcaagcatgctgctgctgctgttgctgcgagcagatggctgtcttcaggctgtccagcccagaatccattcaggaaaaagcagatttccgtacttacatgataaaaactgttttcctccttacaggctaggctagttgctcaagaggaggcctcatgatcttagggaaaaaacaacatgtgcacatgtgtttcctttttttgaaaacagccctgtgcattatttcttagaaagcaggcacatcacaccattgctcggacttcctctacttcttgctgcttttaccatccctgctgctatgccactgctatacagttatatccacctcactgttctgagatttcagtctgcccaagatatacttctgataaattgttcagaaactttctctggttcctgatgctcacccagtccagcccagtcttccttctcagcctgccattcaaggctctccacactctggatccaacttacttttccattcttattttctgctacttctttccacatgccttaaattctaaccaaactggactattcactaattcttaaatatttaccttatttactcaagtcccaatgtagatgccacctcctgtgatcyctccttaggtaaaagtcaccctccctgtgaagcaccatgacaggttagggtctcacctacattgtaattactgtatacctatgttctcagctacactgtaagtccagagattcttgacaaataaatcaagagtgctaaaatttccaattaaaaaacctatttggcagagtatctggctttctaattttattctgggaaaagtaaaataattttataatgctaaggtttgtaatattagggaaggtcatgggatatcctagaactctcatctacaaaagataagataagcctttgtccaataagttgagctctgtctgaacacataagaatagtagtcagcttgcccttctcgattacctgctttataatatcactgggaatacaaacagttctctattaaatctcctaaatgagaggaaaatgtattttataatttaaaatggtatgttcattttgtatgtacatagctctattttgaagaaattgagttttgttaaaacagtcttttgcttataacagctccagattgcttgtgttttggtaaaaataagagatgtggaagatacatggattttgaacttgaactatattttgggggctcttttcaagtattagttccagtggctgagtacagtatgtaaatttcattattattagagggggaggtgtgcataaccactttttttctctattagagcagcaataataaagttttgcatgtctgaacctatctatgtacttagttatgacagaagctaacttgcaagcttgtttgtttacaaataaaaaaggtaaagagttacctgtttgaagtttggaatgtactttccttggaaaaaatattttctaatatatttaggtccctattattttcaacctcacatatattgagaatatccctaaattataacacaattagcatcatatttctgtgggaaatgatttcagagattcttcgtgggataccagcccctcctatcctatcctttgaggaaaaaaaaaaatcacctgctatctcttcctccccttttctaagctgtgggatctgaaattttctctggggattcacctgcttttccaaaattccaactatctaatttcatttctraagagattttctaactctgtatttccatcacagacttttctgatttctggatctgcatttttatttattggactccttcaatcaagctcatttttggagtcaaactttttcatttcagtaaaaccagctytagctcttggtcctctatagtatattacaatttcagtttttctaatcttttaggttcaaattctgaaagtagcactgtccaatagaaatgtaatataagccacaygtgtaatttaaaattttttagtagtcacattagaaaagtaataagaaacacaggtgaggataatttcaggaatacattttatttaacccagtatatcaaaaacataatttcaacatgtaatcaatataaaatttattcagatacttcacattttttcatactaagtctttgaaatatgtgtgttttacacttaaagcacatctgaatgtgaactagctatattttaagttctcagcagccacatgttgctagtagctactctgtgggacaggacacagccttagagagtctgccgctacatttttctcttagccagtgacatattctggttctgcactacctgtcaaagtttgttaaatacatgcaaggaaatttacagaatttttytcgttccttttttcctatacttcttccactcctgtttttagaataatgcatatatcagccactttgttagaataagtcatggtctttgctctcaagaagctcatactctagtctagtctagacgatgtctaatcagtgagatgggcatggaaaaagatactgtgttacagtatggatcggtaattgccataacagagatataaagaagttccatgataagacgatgatgtagttagggtcatccacatttaccagatctgattgctaggcagttgctttcctgaagaagtaatccatgtttaccatgtattatggggctggatgaggacattccaagaagagatagtattcaaagttgagaattagaaaagggcatggcatgtttgaagattaaatgagagtcagtgtatctggagttttgtttgttctaaattcagctacttacrattttctgcacaaattccctacttttttcgcctttatgcgtttgcttttgcagatcactttacacagaatttctttctctgtccctagtcgtttcttaccagtatatataatcttaatcatctttcatggcccatattgatctgatctttttagtgaagcttcttttactcttctgttgtagttttatgccccaaatgaatgtgatatttctcttcttggaattttgaacattttaacttttgtatgacaatattttgtgtattaaagttaattttataatgcagtaatagtctggctcaccaaatcaaattcttaatttgagcaagaattgcatattaattatttttgtataccctgaagagctgagagtgggttccttgtatacagaagatattcagtaaatacttgattcgtggataataaatatttttatgagatatttaaaacaaaagcacaaaattgaagtgatctagagatttcaagtacctaatgtttcttgtagattactttcatggaaagtcttcattaacatgattgactgctgtatgtagttggatgaaatttcttgatttcatttgtaaaaatagatgtcataaaagcaacattctgctgtaataatgaaggtgctaatggtaaagatgaaacctgttttattatgagaaaacagttaaaagtatcttggcataaaaatacaatggaaatcactctttactttgacatttaaggacctgttttgtttctttacatagccatctactgcttctggcaatatggtagactaggtatattaaaataccctgctgctataaaataccggtggctggataaattacaataaatgtacttttaaatgcactttacatttctcattagagaatggagatcttcagtgaccaaataatcgagtagtaatctgaaataagaataataaataaagccagaagctctggctgacctggaagcaaatgctgattccagaaaacaggggctctggacgttaacatttgtgagtaaaacaatcatggggtaatggaaacctaggccctatgctcacacaaagtgagaaagccaacccttaggccccaacaaagccaaatgcccaaagaggccataacttctgggagaaagggtgttctatggatcataagcctgctagttaaagaatctaactaggaaatctgtctgtctatgctggttacaggttgagaaataaagtatattagtttctcctgaatctttacaatagtagctctgaatttatgggcatagagttcaaatttaaattactcatccaattgggaagatactcaaccaataattaaatttaagaccttaatttggtagggctagaacttgtcatccatagaagaataaaaattctttctggagaaaatcatccttaatccaggaatcttagaactcataaatatcaagtacaataaatgtaagctcacagttaaaaaaaaattaccagacacaaagggagacaggtcaccagacaagccaacagaaacaaaaatattcaatctctacgaactgtagatactgatgtttccaaaacagagtatgaaatgactatacataaaacatttaaagaaataaaagatagcctggagcagtggytcatgcctgtagtcccagcactttgggtggctgaggcaagtggatcacctgaggtcaggagtttgagaccagcctgaccaacatggagaaatcctgtctctactaaaaatacaagaaaattagccgggcatggtggcacatgcctgtaatcccagctactcgggagtctgaggcaggagaatcacttgaacctgggaggcagaggttgcagtaaaccaagatcacaccattgcactccagcttgggcaacgagagcaaaactccgtctcaaaaaaaataaaaataaaagatagattgaaaatgaataaggatccagaaaatgtcagaaatgaccgaatttagaaaaatcattgaaatttaaaaattaatagataaayggtatatgggagcagaagagagagaattagtaaatgagatatctaaagaaataacccamaggtactacagaaagagttggaaatggaaaatatgaaagaaaagttgagacatgaatagaaagctagaaagaaaaagttatgcatgcatctaattggagttctagatagaatgggaagagagtggtcaacatgatgatatctgagaatttttcagaattgacataaacccacagaaacaggaaggacaatgtatatcaaataggagtttaaatttttttaaaaaagaaatcktactaaatacatgatagtaaaactagcgcagtaccaaatacaaacgtgtaaagcagctgggaaaaaaagacacattacctataaaagaacaatacagactgataccatactttctttttactccccccaccgcccccagcattattgaggtataatttatatacagtaaaatttacctgtttgaagtgtagagattgatgaatttggacaactatatatagtcgtgtaaccgtcatcacgtttaaggcagaggggagtttctatcactccagaaactccccrcatgcttttttgtagtcagttccttcctcagccctaggtaaacactgatttgctttctgataccatagttttgcctcttctagaatatcgtgtaaaaatatcatgtaaatatcatgtacatatgcatgtagaattcatacaataggtagccttttgtgttaatagcagacctcctaagaacaactgaagccagaaaacagtagaacaatatcatcaaaatacaagtarctgtcaccttagaatttgcatccaacagaaccaagaatgatagtaggttccagttgtggttaagatgaagtaaatatactgtcctttctctcctactgaatgtgtctaaaaaccttgggcagagtgcctggagaagctgtctgaggactctgaaaggtaaatgatagcaaatagactggagaaggaaaatagaacttttaagtacaaaagctctggcaatgagtttcctggatcctttccccactttttgtatctcccagtctgaattcaaagacagcatgaatcctaggactgtgcacaggtgcaaacaacaagaattccaagggaaatttctgatccaaggagcaggaagagaggctctatgagacagagaaagtggaagaaatgctctgtcttgtttttcttccctcccagctctgccatatgatcctctcttctgaacctgcagttttgtggtggcagcagcagccaaccagacacttaaaaatccaagggaagtgaatcctctctgatcagaggaactatggtccaaacagtgtagaatgattcctattgcttttttctttttttaattctcttgctgtttggccccagagacagatctagttgcaggaagtacaagactttctagtcagaggaccgggtggcagtgggggatggargtggggtagtagagtgtcagagagtggggcccttcacagataagagggagctcataaagggaccgcatgatgttatgtatgaacttctgggcccacccttgagccatacaacatagatctgaccctaaacagcataccaagtagctgtgggatagatagcccacccagatatcaggctggctcctggctgatgcacatctaggacagattcaaatacatcctgttcttcatagaattggagcaagacccagagtctcatagcatcttatatcccaaatgttcatgatatgatacaaaattacttgacacaaaaagaaccaggaaagtctgattaagtctcaagggaagagacaagataccaaccctgagattacccagatgttttatattaggcagtgattttaaaacagctgttataaccatgctttaagaaataataatctcagttaagaaaaagaagctataaaaaagaaccaaatggaaattttataactggaaaatacaataattagaaatttgaagaaaatcactggatatgttcaaaagcagagtgcttgtgacaaagaaaagagtcagtggatttggagacagaaattacatgaatggaaattrtctaatcagactaaaagaagaagactgtaagaaaatggacagagccttgggatcccctgagataataccaagaaatatctaacatttgtgccagtggagtttcatacagagatgagtgtggtacaaaaaaaaaaaatttggaaaaaaaaaaaaggtggctgaaagcttcccaagtttagtgaaagacaaacttagaggtttaagaagctcagtgagccccaaatacaataaagaaatctatgcccagattatcataaactactaaaaaccagacacatagaaaaaatgttggctgggtgctggctcacgcctgtaatcccagcactttgggagactaaagtgggtggatcacttgaagtcaggagtttgagaccagcctggccaacgtggtgaaaccctgtcactattaaaatrcaaaaaaatttwaaaaaaaattagctgggcctggtggcagtcacctgtaatcccacctacttgggaggccgaggcatgagaattggctaaaccctggaggcgaaggttgcagtgagctgagatcataccactgtactccaaccagggtgacagagagagactctctgtctcaaaaaaataaaaggctatttaaagaaataaaattgtttgagatcagctagaaaaaaaaatgatgcattacaggggaacaatgattgcaacaacttcagaaaaaaacatgtaggccaaaaggccagtggaataacatttttgaagcactgaaaccagaattttatatgtgacaaaaatatgcttcaggaatgaagatgaaatagagatattcacaggtaaaggaaaactcagaaaaattatctccagttgatctgctttaccaaaaaaaggataaaggaacttcttcaggtaaaaggaaactgataccagagagaactatagaactgcaggaaagaagagaaacagaaattgtaagcatttggataaatacagtattttttctacttttaagttcttaaaaatatgtgtgatggttgtgattaaaaattaccaatgccccttgacttacagtgggattacatcccagtaactcctgcataagttgaaaatattgtaagttgaatgtgcattttcaacttaggatgggtttatctagatgtagccccatggaaaatcaaggagtgtactgaatgcatatggcttttgtaccaatgtaaagtcaaaaaaaatcgtaaggcaaactaagtcgaaggccatctgtaaaacattggtggaattttctatatatgtaaatgtaatacagatgacaactataatattaaaggcagtaatagtaaattttctacatttcacttgatgtggtaaaatattaattttcaatggacatgaaaacttaatatgtatattgtaatccctaggtcagtcacacacgtgtgcacgcacgcacacacacaccctatacaaagatgcaatagataaaatggaatatcaaagaaatattcaaatactgtaatgcagaagaaggtgggaaaggagaaagagaggaactaaaaacatagtggacaagcagaaaataaactagtagacttaaatccaaacctatcaatactaacattaaatgtaaatgacctaaatacaccaactaaaaggcacgatattatcagattggatttaaaaaagagaccaaaatgtgtttacaagcaatccactttaaatataatgatgtaggtagattaaaagtatagaaaaagatataccatgtaaatactagtcaaaacaaagagcaaggaaaattaccaaaggtatagaaggacattacataatgataagagtcaattcaccaagaagacactaacagtcctaaatttgtaggtacctaataatagagcttcaaaatacatgaaataaaaactagcagaatgaaaaggagaaatgaacaaatccacaattattattggagacttcaacacttctctctcagtaatggatatgacaagtagacagaaaaatcaacaacaatataaaagaattgagcaacatcgtcaatcaaatgaacctaattgacatgtatagaacactctatgcagcaacagcagaaaacacatgctacttcagtgcacatttaccaagatggatggtatcctggatcaaaaccacccttaacaatttgaaaagaactagaattaaacaaaatgtattctttaatcataaagatttaaactagaaaccagtaacatatatatggagatttactcctcaaatatttggaaattgaataacacattcctaagtaatctatgggtcaaagaggaaatgtcaagggatattagaaaatattttgaactgaacaaaaatataaatacaacatatttgtaggatgctcctaaagcagtgcttggaaggaaatttataaaattaaatgcttgtattagaaaaggagtctcatatcagtaatttaagttctattgtgagaaactagaaaaagaaaagtaaaataaaaccaaagcaaatagaataaaggaaataataaagaacaaattaatgaaattggaaacagaaaaacattaaagaaaatcaataaaacccaaggctgctacttttgaaaagccagcctaaccaaaaaataagacacaaattaccagtgtcaggaatggagcactgtaaggaactcaattgacataaattttgcagtgtaaatgaaatggaccattttttttttgagagccacaaactactaaaaattatttaaaaagaaattaaagaatgaatttgtagttaaaaactttctgaaaaagaaaaacagaagcctagatgtttttttgtgatgaattctaccacatttcttcttatttaaagaaatagcagttctacacaatttcttctagaaaactggaagagtatgcagtatttcccaactcattttttgagaccagtgttacattgatactaaaaccagataaactataagactagtacagattagtattctttatactgtacacataaaaattctgatcaacatattaagaaattgaatcagyaatacataaaaagaacaatacagccatgtgggatttatcttagaatgcaaatcttgttcaactgaaatcagtctttgtaatattaatagtctaaagaagacttgatgctaatatccatatgtatatatatgtatacagaatataatgtatgtatgacatatagatgacatatatctatatgtcagaattcaacatccattcatgataaaagctctcagcaaactaggaatagaagggaacttcctaaaactgataaaggcatgtactaaaacaaaaacaacctatagctaacgttatactttgtagtgaaagactaaatgctttccccctgagatcagmcaacacaggatatctactctcactgcttagtctctcactagaaatcttagccagtacaataaagtaagaaaaataaaaagaaataaaactattcatattcacaaatgacatgattgtccatgtagaaaagttcaaggagtctacaagtaaatgcttataaacagtaaatgagtttcctaaggtcatagaacacaaggtcaacatacagaaattcatcatatttctctatactagcaatcaacattggtgttttaagatatagagtttattattaagcaggtatagtgaggccaacagatcaggacaccactaccattgagaagatagtttattacttacagttcccaagaggaggggccgtgtcacaccacacaaggccatatggggatgcatcagggtcgatcaggaggcagaaggaacagaaggaaaacgtgggcaagagcctttgttgtggtttccacatgaaagaatggatgaggcagggtaagcaggcttaggcttggctagtttgaataatttcagcagttttggggtgtaggggctatctctaagtgtctggtacttggccctggggtgattagagcagagaaatagtggcttggagcataagagctctataatgcaggtagttggggatgtgagctttagattggttggtttgcatatgaaaggcacgcttaaaggttagtcttttactctctctaggaattgattagccctgggaggggtagtctctccaggatcagcaagggcccagatttcaaaacatcagaaataaattaaaaggcataattaatgcaattggtaactgacatttaaaacattattatttacatttgtttcaaaaactaaattacttgctataaatctaaatgtgcagaacatgtgaaaactacaaaagttgatgaaagaagttaaagaagacctaaataaatgaagtgtactgtgttcatggattgatggatttgaagactctgtgtagtaaagatgtcaatttcccccaatttagcactattactttttattgcatctatagagaaattgacattaattttatatggaaaaacaaaataactaaaatagccaaagcaattttgaatgtgattaataaagttggagaagtcacattactcaattttcatacttacttcaaagctatactaataaaatgtggtattagtgaaagacatagagatcagtgaaacagaagagagtttaaaataagactcgtgaatgtttttgttttttgacaaakgtgcaaaggcaattcagggagaagggatggtcttttcgacaaatgataaacaattctacatatattaagaaaaaaaggttgttgatctatagctcacatcttatataaaaaataactcaaaatgagctaaatgtaaaacttacagaagaaaatatatgagaaaatccttctggccttgggtttggaaaaaattctgtgatatggcacccaaagcataattcataaaaaataattgataaattgtactttatgaaaattaacggccgggcacggtggctcacgcctgtaatcccagcactttgggaggctgaggcgggcagatcacaaggtcaggagatcaagaccatcctggctaacatggtgaaaccccatctctactaaaaatacaaaaaattagctgggtgtggtggcaggtgcctgtagtctcagctacttgggaggstgaggcaggagaatggcgtgaatccgggaggcrgagcttacagtgagccgagatcgtgccactgcactccagcctgggcracagagccagactccatctcaaaaaaaaaaaaaaaaagaaaattaacaaacttctcctctgctaaaacactgttaagaggctgaaaagacaagctgcagcctaagagaaatgttgcaaactacatgttcaaccaaagccatgtagccagaatgtataaacatttctcaaaagtcaacaataaaacaaccaactcaattagaaaatgagcaaaagatttcaacagacatgtcaccaaagaaaatacatggttggcaaataagcacatgaaaagatgcttgacatcattaccattaacaaaattcaaactaaaaccacagtgaaataccagtacacatcatttatagaatggctacagcaacttttaaaatacaacagtttaagtgctgatgagaatatggagcaactggaatgctcatattcctagtggagatgcaaaatagcacaaccactttggaaaacaatttggaagcttttcataaagttaaacatacacttatctaagtttccagcaatcctacctctcggtaaaccttcatgctagcctggataaatgaaaacttgtgtacacacaaaaacctgtacctgaattcatgatccactaaaactgaaaacgacttaaaaatccttcaatgggtgaatggataaacaaaccgtgtaacctccatacagggaatattactcagcaatataaagggatatgctgctgatacccacaataacaggtaacccaaaggcattgtatgagtgaaagaagtcagtgtgaaaggttatattctatgattatgttcatataacatcctggaaaggcaaaaccgtgggaatgaacaacagatagtaggatcaggagttggagaaggcaagagggtttgaccacaaaggggtagcatgagagaacttctgggggtgagagaattatttcgtatcctcactgatgatggtggttgaatgaatgtatacttgctaaaacttgtagaactttacacacacataaaatttaattttacagcatgataatttcaaaataaaaaaaggaatgatgattaaacatagacattttcagtaaacaaagactgataaaatttaacaccaagagatgtacattaaaagaacatctaaaggttatcctttgatcctaaaggatcctaaagggaagtctgagatatgaaaagaaatggcaaaggctgagtgtggtggctcatacccataatctcagcactttggtaggccaagacaggacgatcacttgatcccggaagtttgagaccaccctgggcaacatagctaagcattggtggcttgtgcctgtggtcccagctactcaggaggctgaggcaggaggatcacttgaaccagggaggttgagactgcagtaagtcatgattgcaccactgcacatcagtgtgggcaacagagcaagatcctgtctcaattttaaagagagaaatgataaacaagaaatgtaaacacagaatttgaatttaaatggtctataagattgggtaatttaaattatttggataaatctgaaaatatctaaataaaaataaaatataaattgtggaattaaagaactaaaatactgaacagaagtaatgtgtgagcaaggaatgtctaaaggtcttctgttctatgaaagatagatcaagatttgattaacttttcagtttaacttcaagtatgcatggtgaaattttgaaaacaataaaaataaagtatattatttccaaaccagtaaaggaaaaaagaaaacagaaacaactcctgaatcaatttaaaaaacaagaaaggaggggaaataaaaatcacatagaggaaaagcacaaagtaaaatagtaggaaaaaatggattaaatgtacccaattaaagacagatttttatcatgttggatttttgaaaactcctgctgaatcttatttataagacacacacccctaaaacataaagactcagaaaatataagtatctttttcttacataccatgcaaattccaatcaaaagaaatatggatttactaatatctaataaatgggttaattaattaaatgtaacagttcttaagattaaaaagcactgttagggataaagaggatcattactaattaaaaggcttaaaaagatatgacaatgtaaacgtgtatgtattgtacctaataacctcagaaatgtataaagcaaaaaattgtagaaccacaagaagaaatttataaatgtctactgtcacagtgggacctttcagtatacttctctcagttgatgatcaaacaacaaaaatattggtaaatatatagacttgaataaatttgatcaggtggacacatgtagaacctcatatccagcaattgaagaaatgtatttctcaagacacatcaaaaaattattaataattgaccacacaataggccatgaagcaagtctccagcatcaatgaatctgtatcttatagactgcattctttgactacattgttgactacaatgcaatgtaattagtagtaaaaatacaattaaaacctatacatttaaaatttagaatcacatttctaaagaatttattttttttagtcaaataagtcatataagaaaaaatgttagaactcaacagtaatgaaaatcctgtatattaaactgggatgcagctgcagcaggacttttaagaaactgagaatgcaagttttgagtggaatttgaaaatataaggggcaaggtgagtattagaaaacttaaattttttccaatataaagtacacagtgaaaactaaaatgaactcaacaagaagtgaataacccagtttaaaaatggacaaaggatttgaacagacatttccccaaagaagatacacagatgactaataagcacatgaaaatatgctctacatcactaaccattagggaagggcaaatcaaaaccacaaagagattacactgaacactcatgagaatggctactattaaaacaacaaatagaaaacaagtggtgttgaggatgtggagaaattagaacccttttgcactgttggtaggaatgtaaaatagtgcaaccactgtggaaaatgatattggtggttctgcaaaaaattaaacatgtaattaccatatgatccagcaattttacttctgggtatatgcccaaagaattgaaagcacatatgttcatagcagcagtactcatagtaaccaaaaggtggaaacaacccaaatgtccatcagtggataaatggacaaacaaaatgtggtatatgcacgtaatggaatgttattgagacagtattctcaaggttaaagaacaaaatgcagctctttgctctttttaagaaatacctgaaacaaaattatattaaaggctaacaataaaagaagaaacaacgatatatttattttgggtacaatatacactactcaggtgacaggtgctctaaaatctcagacttcrccactatacaattcatccatgtaaccaaaaaccatttgtaccccaaaagttaatgaaataaaaaatatttaaaataaatgaataaaaggctgagtgcagtggctcacacccgtaatcccagcaccatgggaagcagagacaggtggatcacttgaggccaggagttcaagaccagcctggccaacatggcgaaaccccgtctctactaaaaatacaaaaaattaggcgtggtggcgcacgcctgtaatccctgctacttggaaggttgagacaggagaatcgcttgaacctaggcagtgaaggttgcagtgagctgagatctcaccactgcactccagcctgggcaacagagcaagactctgttatcaaaataataataatagaaatgtaaacaagatttgatggcaacatcatattacagaaactaaaacttagggcagaatttgtgatgaacagggatgtcttatagtggaacaaaactgcacaacttgtgaagaggaaacaaaattatgcacttttatgcatacagcattattatatatcagtgaatacataaaggcaaaatctttagaaatttacgagtttgatttaaaactacagttatattggacatttataatagttctctcagcatttgacagatcaaaatgacaacacatataaaagtaattaacagtgatgcttagtttaatagaatactacaaatagagaatatactttcttatcacatttccatggggagaactggccacagataaaacgtttaaagattcagaaatagaaaatcctgtcatattccctaatcacaagggcatatatagtttttgtgattccctactcatagggtttttttgttattgttgttttttgagacagagtcttgctctgtcacctaggctgggctgctctgcagtggagtgatcatacctcactgcagcctcaacctcctgggctcaagtgatgcttctgcttcagcctcctaagaagctgggactgtaggtttgggccaccacacctggctaattttctttattttttaaattttttctagagatgagatcttgcttttttgcttaagctggtctcgaactcctggcctcaagcaatccccctgccttggtctcataaaatgctgacattataggcatgagccactgtgcccagcctaaatacagttttaagctgtggttttgggttgatttgtgggctcccaaaattcatatgttgaaatccttaacccaagtatctcagaatatgaccatcttggagatacggtcytcacaaaggtaatgaagttaaagtgaggtcattaaggtgggccttaatttaatatgattgttctccttacaaaaaggggaaatttagacacacacataaaaggaagatgatgggaagacacagggagaaaacagtcatccacaaaccaaagagaaaatcctgaaacagatccttccctcacagccatccaaaggaaccaatcctgccaacaccttaatctgagacttctagcctccaggactgtcagacagtaaatttctgttgtttaagccacccagtttgtggtactttgttatgatggccctggcaaactaatacagctaccatttcaaacttgaaaatattctgctggatagttttaagatcagagaagttttaagctaaaataaatgaaaatgagaacattttacataaaaaatatgagggctcctcctttcctgaatgcgatttggcccccttataaagctaaaactgtggaagagattttatagactaaatgcttgtgttttgttttgtttttgttttttgtttttgagactgggtcttgctctgtggtccaggctggagtgctggagtgaatatggctcactacagcctcaacctcctggactcaagcaatcctcttgcctcagcctcctatgtagctgggaccgcaggtggattgcttgagcttaggagtttgagaccaactggcaaatggcaagacgccatctctacaaaaaaatacaaaaaagtagctgggtgtggtcatgcctgtctgtggtcccagctatttgggaggctgaggtgggaggattgctcgagcctgggagttggaggttgcagtgagtcgagattgtaccaccacactccagccagggtgaccgagcgagaccctgtccccccaaaaaatggaaaataagcagatcctctaaaactcaataaactagaataaaacaaatataaatctatttaaataagaagagaaatgtgacaaatgtggtaattggaattaattaggaaattagttaacaacaagaaaaatagagtcattgaataaaaccaagaactggtctttcagaagacaaatctttaagaagtttcaccaagaaaaatagaaaccataagcatcaagaataagataagagattgcacacagatatggatgaaataaggaattataagtttgtgggcagaaaaatggaaagtccagaagaaataggtgattttctagaaaaaaatgttaccaaaattgattcaagaagaggtaaacacatgagtaaacttccaacgaccagagatattcagacagccattactaagaaggaacaaagtaaagatggttttaaaagacaaatcttatgtagtcttcaagtaatacttagttcttgtatattgtgctacggtttgaatgtgtcctctccaaaattcaggtgttaatacttactggccaatgtaaagatattaagaggtggggtctttaagaggtgattaggtcatgagggttcctcctttcctgaatgggattaggcccccttataagaagcttaatggagggattttgttctgcttgcccttctgtcttctgccatgtgaagacacaatgttcctcccctctggaggggatacagcaacaagctgccatcttggaaacagagagcagccctcaccagacaactgaacctgttggtgccttgatcttggacttcccagcctccaaaactgtgaaaaaatacatttctgctctttataaatttcccagtctgtgatattctgtgataggagcacaaaacagactaagacaatatgtaactatataatatagtttaatattattcttggttctgaggtctagaatagtacttaacaaatttaacaagaaatgtgtaagacctatatgaggaagatgacaaaactataaaggcaaaataagatctgaataaatggagacaccacttatctgcttggaaaagcatgtaaacatgtccattctcttgagataatatataaattgtaatgcaaaaccgtgttatttcttaaaaaaaaaaccttaagctcatctgggagaataagtaaataaaaaatgccaattttttttttttttcctttttagacagggtctcactctgttgttcaggctggagtgcagtggtgtgaacatgcctcgctatagcctcaacctcctaggctcaagtgatcctcctgcctcagcctcctgagtagctaggaccacaggcatgtgttaccatgttcagctaattttaaaaatttttgtcaagacagggtctcaccatgttgcacaggcaggtttcctgggctcaggctctatcctcttctatcctcctttatcctctatcctcctgccttggcctcccaaatattataggcacctgcccaaaaaaattttttaataagacaattaggactccataaatatcagaacacagtataaagttacagtgattaaaacagcatcatatttgttcaagaacagacagactgggagacagagttaagtccccaaacagacctttgtatgtataggtacttagaatctgagtaaggcaatcagatcagtggggaaatgaattctttaataaattgtgttaggacaattcattgtggggagcagatccctacttcaccccatacactgaaaataaatagcagatggattaaataactgattgttttaaaaaatgtgtaagaaggccaaagaaatgtctaagagaattctttcaaaatcttagaatgaggaaaaccttctgaagcaagacaaataataaaaaaccattaaaaaaattaacagatccaagaattgaaaacacacacacatctttgtgacaaaaagaaaagttaaaaggcaacaacagactgagggaaattatttgcaaaatatataacagagtagacataaaatctataattaacaagaaaaagaccaagaatcaggagaaaagtaaagaaacatgataggcagtttactgaagaggaaacccagtgaactatgtaaaaagatactcgacttttctagaggacacagaatgactatcgtgtatcaagcattgcttatgtagtctttcacagtcctgtcgaagcagatattattcttttaacaagtgagaaaactgagtcttagaattagtaacttatggtggacgttttttcaaatactgtaatttatcaaagtggaatgttttttgcattaagttaaaatcctttctgtattctctaattcacgactatctttaaattttgttttcagaatacacttgaaggtgtttatttagtatgccccttgaagagaaagggcaaggaaagaaatgcagttggctacccttgatcatgtgaccctaacaggttaagctttcaggacacacacttgcatgcatatatatttgacttgagaagatagacatgatttttacgaggatttgtttctgttctactttggcaaatactgcatgaatcatgtctctagattttgactggctgggtactttttttatatgcctgaacttcttgacatagtattgaattgtctttcaagtgatccaaataaataatacatatctatacatttatatcactgtaaatttggaaatgctgccataagtgggtaatggtaacatcataactgaatggacatgcaggagaccaatttggggtctatttgaggagagggtagggggacaaaaggtgtttggacatgttgaattcattgtgcttctgagggccagtagtaagaattagctgatagatagttgaaattttgactctagacttggaactgacaagttgagtcttgtctttgtactcagtgttctactgaaacaagttgtatgtagtcaggaggtgggttgtattaagggctgaggagggagaaggccattatccataataggtttatgtatttggcttagtctttatttaaaaaaaaaaaaaaaaaaaaaaagtagagcaagaaatgttccttttgctgtgattggttctcatgaaaccggaagaacagttctccccacttaaattaccaccattaagcagtggttgcctttatcacatatacagaattctgtaaaaattttattccaaggttttagtccttgaagtagaccaaaaataaaataatttttaaactacttcccagaggagtgtttttctgctcaataaggaaacagtcacatggcatycaaactctatacaagcagtactgtgtcctttgtcctcacgcaaatctggttagttacctttccttaatgttatgttaatgcaccatcagaaatggttgcaaaaggctatgcattggctgaggggctaccaagaatggcagagtggaccatactcaactcattgtaggagttggcaccctcttcaactgtaccccaaccccaaaatatgagagtccacattttcaagggattttcacatgaaagagataattcctggttagccaagtgtagcttattagcacagccttctcttaatctttagttttctgctgtccccagttttctactgtttgctgccgggttatcatcttgccttttgcttatttcttcttactctcttccctctctcctctgacagccattacttctgtatacctaccctcaaagttataacagaactcatgtgaataatcagttctctttaaaatagagggcacatgattattatgcctgtttttcttctcaagcaaactagacagggaatagggatgggaggatacccagaagggtgtggtattggtggtaattggattactgagaatttggttattggccttgttttactttgtgattgttaatgctgaatgaaaggatgcatgtgaaacttacaggaaaatagccaactccaatcacagaaatgttacaaaccacgtgttgcctaaagaaagtaaaatagaaggacataatgattacaagctatttggcttttttttcctcttatttggcttttaaaaatgacttttggctgggcgcggtggctcgcgcctgtaatctcagcactttgggaggctgaggcaagtggatcacctgaggtcaggagttcgagaccagcctggccaacatggtgaaaccctgtctctackaaaaatacaaaaattagccagctgtggtagtgggcgcctgtaatcccagctactcaggaggctgaggcaggagaatcacttgaacccgggaggtggaggttgcagtgagctgggatcgcaccactgtactccagcctaggcaaaaagagcgaaactccataaacacaaacaaacatacaaacccagctacttgggaggctgaggcaggagaatcgcttgaatgcaggaggcagaggttgtagtgagccaagatcacacccttgtactacagcctgggcgacaagagcaaaactccatctcaaataaatagtaaaaataaaaatgacttttaaagctgaaagatacrttatttgcaagacggagttttaaaaatcatattctccaggggcattaagttaactgtctttgtgctccagttatttagctttcaggagtttagtgttttattgtaaaccgacattgtgcaccatcttgatctgaggtgaatgccaaggaattgctttttaaagtgatttttagaataaaagaaaaccatttcatctctgatttgccctccctttaaaaaycccactctgcatttctgtcttacggcttctgtactgcatcagtcctcctcaagccagccagctccatgcggaacattctgttgctctttcagcataagcaggtctattgtgatatttatctgaattcaggcaaggctaattaaaagagctgctgacagttgttgtgatctgactttgactgcagcttgatggtcattatgggtaaataatgaaccaggtctgcaaatgtagcagctgccaacttgggatagaagaacggctattgcttccaatttaaggatctatcgascgcttctcttctccctgcagatcttctgcagaaaactaatgttttctgctgctgtgtattgtggtttcagctgtttcagatatagcctataatttccttctttaatatttaacttaggacattattagctttcagagttaacaacttttctattttgaagaatctcagctttgtccttgtgtaggctttagctaatcagctatagtttatttatatgcatttaatttgtgtgttgtgcaggaaatggctagtctgtaagagcaaggtatagctttattaagatgtttcacaatcgtatataggtatctcttctaaaaaaagagatagatgcatgtcccttgcttttgttttcttaaacacctaccaaatctcagttttgaattttgttcactttgtcaatggcttatgaaatattttgatgcagagctctatttatcaattcagaggaactgctgcagtgactttcattaaaatgcaatactgaatatattgtcactccatcatgagcttttccttgtcctattagcaagtaggaacaggtgcattaaggtaagagagaaggcaaattgcattcatagattartattcttcctgcagatttttcatacttgtgaaatacagtttctggatttaaaagtcatattctagaatttaacacaagccagcacttaacaacacatccctagcgtttattcaactgccatagaaaagactgtctgcgttatgtaaagtctgaggatacagtggtgctttgtgcataatgcagcagagctttgagatcttgctgggaggaaatgatcccaaacatgcccctgaaagacaagccttactctgaaaaataatgatgaaaaattgcttatttcttcatgtatttgtgtctgtgtttatttcaggaaaagctaactaaactttgtttatctgactccagaagagtgctgtgagtgtttttgcttttctgtttccagcttggataatgccagaaatagtgttaacaaggggttatgttatgctggcttatgttaaaccagatcacccctaacatgtgcaaagccattcatctgtgtcaccaaaacccaagagaacatctgacatggactctgaaacagaaacagtgatcacttacaaatcaaacatggcacgctctaaactgattgtgcacggcaatcttttctagaaaggacaactaattgaacatgataaagtgtaaagttaattaacacccttaaatttgttgattactttcacgggattatattgttcgttgagtagcagctttctgtcccagctgtcgcctttttctgcgaatgtcgctggtaaacaatagagacaccatagcaagtcgtaaatggtccctgtgacagcagccccttgtgaggctgcatctgtagaaaatgattagaacaattgcattttaaagatggctcacattgcagcccaagtcccattggtcctcttcttgatctcttttgatggcacactggttaaaacatttaagttcttttgagtaaattaagtgatttactatgtttggctatatatcaatggaagtgctttggtggcaatgtttttacagtattaaagacaaatataatttgaattgtactttttagttttccatctcttccctctttggatttgaagccttctttctaatagtcatagaattgaaaatgatctccttatttgtaacttgggagtagtagtagcacctgcatcatggtttatctatcataattctttgggtcagcttttcagtaaggctaaattccaaatttcagctctttcctactgttagatcaaagacttcgacatgtttaagctgaatraatttacttgttatgtttaaattttttataacatttgtgtaatagctatatacctttccaatgtattgtttcatttgagtgtcaaagttagtatggccagtgtttttatcactgttttcagatgaagaaaccaagattgagaggtgttataacttgtccaagaggtgtgaccctgcactgtgatttctttccaagtcttttaactcaatcacgtttttcacttttaactcytcataataatgtccycatacatgtacacttagcttatgcatgtttatgtagcagtaagtgaaaatgccattaccacatgtaaagaatcatgctgccccaaagttgagcttttaaaraagtaattgacaaaaaaaaattgtatatattgtgtacatgttataaaatatgtatacattgtagattggccaaactgagctagttaattacctcacatactaaccatctgtgtgtatgtgtatgtgtgtgtttggtgtggtgtggtgaagttacttaaaaatctactctcagtaattttcaagattacaataaacacattgatactaaaaagagctttttgataaactagaaaatattaagtcttaatgagtcttaatgagtattcttggtcattttattagccattgatatctgcctgcctactaagaagaaaattaacatttatcagacacatgccatgtgctgggtgcaaagattcaaacagctcatgacaataaggatcttaataagacacaccagaaaaatcattgattagagtagtgtaagtgctttattagagatatcaccaggaatgttttaagaatagagaaaggggggtcatgaaatacttctgagttgtcatgagttgagtcttgaaaaataagcaggagttagccaggcaaagaaggcagagaagggtatttcatgtgagggaacagcccaagataggcatgggtgcatgaaaaatcattgcacattctggccattgcaaatagttttcagtgtgcattgagtggtagtttttgttgcaagggttagatgaggagaccagagaagtaattaggattcactgacaaggaaaataaagatttaaaaatcagagctcatttaaggagagaagagaaaattcattgcttcctacaactgaagacagaagagagggtacagtgagttatgtagttctcctttttgctgaagcataaatatacaggtacttcagaaagaataacttaatggagaaaaaatgggaggaactttgagattatataagaaatgctggctgggcgtggtgactcatgcctgtaatcccagcactttgggaggccgaggcaggaggatcatgaggcaaagagatcgagaccatcctggccaacatggtgaaaccccatctctactaaaaatacaaaaaaatttagctaggtgtggtggcatgcgcccatagtcccagctactcgggaggctgaggcaggagaatcgcttgaacctgggaggcagaggttgcaatgagctgagattgtgccactgcactccatcctggcgactgagcgagactccatctcaaaaagaaaagaaaagaaaagaaatgctaagtaatagtgaataatgttttcagttgctggttattttcatgttaatgtataacttaagccttgagcctgttttcattcttatatcaaataaaactgcccaaagattaggagacagattagcataaatgttagaatgaggtgatgtaagttttacttcttttataggtataaggctaagattagcctgaaaagggtataaagcaagaaccaagcttcaattcagtttatcttgggaaaaaaggtcactatttttgatgcaaaaatgtgaaaacattgttcattacttcatttactgttcctgcatgaagttccaaatgagaatttttaaaaaatatgttaactgagttcaaggaaaatatatgcttgctctcaaatagagtttcccaagacttgtaggatactcagatctatatttgagatttgttgtgagatactatggtttctttttttattcttaatactgattttgttttcctttgaaaattcgatttcattttttaattgacaaaaattgtatatatttagcatgtacaacatattttgaaagatgtaaatattgtggaatggctaaaccgaactaattaacatatgcattacctcacatactatttttgtgataaaagcacttaaaatctactctcagcaattttcaagaatacaatacattgttattaactataatcaccatgttgtacagtaggtctcttgaacttatttctccttatttctgattttctaaaagctctctattttttttgctctgataagcaaacccacattgrttgtgaagagtggtggagtattatgtgcatttagataacaggcagaactcagcgtctaataaaaagcataccagattacttgctcagttcatgttaaactgctctgaactagawtcacaaatggattcagaatacctgtattctcatcagtttttatatgcctacctacagttgacagcaagaatattactcttcaagaacaatatcttgttttttcaccccttctctgagaattcattattctttcaatgacgagggttgaaaaatgaaaggaaagggggaatcaggatttggtggcgattgccctcattcatctgacacttggtatgtgatgctaccttttggcattttcttctggttatacatctcttttccctaattatattttggaytttttgagtgcaaagactaggttttatatctaccatgaccttagttttggactgtctgtgatggtcatatttcaagtagtttctgaatataacagaaaacaagtccttatttttgattcagcaaatatgtttactcgttgaatctttacacatagcacagagatctagcaagttgttaaaggcactgaataaatatttgctgatgatatttttcctctttggacctttgtacaactgtatgccctctaatagcatgaatctgacttttttattagctatatgtattttccttatcccttcccccacctccattctccaacttctccctccccccaaccatcacaagcacaagatttcaaactccttgagaacaaggattgtttcttcctcattctcagggttgaggaccactgaagaatggatctccagtgatcacatttttgatgtcaactataagtaggtgtggaagggaagaaagaaggcagtttagcaaatggagtcctctatgatactttttttttttttttttaagagagagagaggctgacttagaggatttgtgcttagatttaaaagtgcttctccactataaggcttattaaaatcaaaacagactaccacgagaagtgacagatgtctatcactttaaaatcagggtagtcagctacccattttgcatagtttgggcatttgctttttcatttatttgtacaaatgagttcaatgtttctgattgtagtattatgggagagaaacactagagacatcatcacaggaaagtgttagaaaaagcactaaaggcagycacaaatatttaggctttttagagttaatgtagttacatgagaaaattttcttttttctcatttggaacaatttttttgtgcaaagtaaaacatgccatagttttgtgtattaatataataaatgtgggaaagtggatgattatgaacttgaaaacccaaaattatcatagaatttcaaaagcttaaaaggaattcagtgatgattttctctaaccacttcacatcctagatgaagaaacagggtgagcagcatttaatgacttgctggaatgatagaaatgctttgtctgtaatccttggcatcttgtgcatatcttgtgagagcagttatcacatggtattacagtcgttgtctstttccttgagactttccttctctcttgcctcctgagaatctcttatgtactagagctagtggatgtgagtgaatgagccaacaatcactgccctcatggaggtagtgttattctaggggatacagaccagaaacaaatgaaactgttaaagaggtgataaatgctatgaataaaattgaagcaggaaaaggagagagtgatgagatgctattttagattgttaggttgagtggtcagggaaggcctctctgaagaggtgaattttgaacagaggcctgaatgaactaaactataccagtcatgagtatctgggggaagaacatttcaggcaaaaggaatagcaagttcaaggctttgagatgggaacatacttcacctgtttcaagaacagcaaggagtgcaaggtggctggaaagcagcaagtgatgggaagaatgatatgaaatgaaataggagaggtagcccagagccacatcatgtagggctttgtaggacttgggattttatactgagagggctaggaagtctttggagggttgggaatagggaacaaacatgagctgggtgaactagatttatattttaagaggattcctctagctgctatatggagaacagactacagagacaagaggagaagagaaataaagtaggagactattgcagtaatccaggcaggagttacctgtagctcagaccgtggtagtagggatggacagtgagagaagtggctgaatcaccagtgtgtaccttcttaggagcagggacatttgtgattcatccttcacccaagggcttaccacagggcctgattcttagcaggtgcccagttaattgtgttgaatagataaaacaaatgcagatttcttgtctttcccattcactatgctgccagagaaagattttgcaagaagtcttcacagtgatgtcatcttaacatagtggctgtagaccactaaagttcttcttgacctgtgccagcctacttctgttatttataggtgcggcccaaacccgctaatacttaaaaagaggggctaaaattatcccagagaagacaatggcttaagtaactaaataggaaaatgcccacttcacaaattcaagttaaaaagtagtaagcccttacatttaaatagcatttttagctggtcacggtgctcatacctgtaatcccagcactttgggagaccaaggcaggagaattgcttgagcccaggagtttgagaccaacctgggcaataaagtgaaaccccatctctaccaaaaacaacaacaacaacaacaaaaacaaatagccaggcacagtggcacatgcctgtagtccgagctactcgaaaggctgaggtgggaggattgcttgagcctgggaagttgaggctgcmgtgagctatgatcatcacactccagccagggtgacagagtaagaccctgtctcaaaaaataaataaataaatagcatttttattttacagcatacattcacatattcacagccaatctatgaagaagttattaatacttttcctgttttatacactgagactcagaagttaaataatttgtcacacaatttgccagcaagtggcacatccccaaaacaaaatataacatttccagatcttttaccctttctaccatgctatttatcagccaaccatttgttgagtatatcatgcactataatagataatggggatgctggcaagccatgacctcagtgctgactttktaggaagtttataatggaggaatcagacaagaaaatccaagattttaataaagtatgataaatgctgtaatagaatcaagcacagggtggattttggttttgtatatataattaataaaatatatgtaaaataagtatttctttcagtattctagcaactacccgagtatgcattgtgtgtttttctattttagaaaatggactagaatcaaaatggcgtgtcattgtaataaatttcttcatttttgatagacataaacatctatacaatgtctcctgaaatccataagctgtcttacacagttttagagtcgcagctttctaggtattctttcctaagttcaaaatggttacatttatttcaggataatttcrgtctttttgttttgtttttgagacagggtcttgctctgttgtccaggctggagtgcagtgrtgcgatctcagctcactgcagcctccaccttctgggttcaagcaatcctccatctcagcctcctgagtagctgggactacaggcacatgccaccatgcccagctaatttttgtattttttgtaaagacggtttcgccgtgttrcccaggctggtctcaaacttctgggctcaagcagtccaccagcctcaacctcccaaagtgctgggattacagatgtgagccactatgcctagctaatttaggtctttggctgtgggactaggcttgatagtgttatatgattaaaggaatatgtatgagaagataagatttggttccaaggaatgtcaaaactttagaattacccattttagttagatgcttactttgggatgtaggttatgatgaagtcggaaataattatgataccacatcaatatgaggaaagagtcgaactaccacagacctctgaattaaaagataaattattctttcttttgtggtcttctcttgcttaagcaacttatttctgctttttaaaatatgtgtttgaataagtgagaaagtacacctgtcaaaagactaaccagctgagaaccattgtcagcattaattttttttaaataaatgactccgaagctatttagcagtctgtaatctaaatacaaagcaaaactattgatctatgatggatagtgctggatttgcttgtaagctttgacttaaatcgtctacttaatttctctaggtgagatcaacaggattaggaggaatggtggttatatggtttaaataaaaatgtctagaaattgagcgaaataattataaaacattaatggtttaccatcttgataaagtaaactagaaactaacaaaacagcagtcactttaatgttataagaatgtttgaatgacatagattggctaattgaaagcattttttataaattgggtttttgtatataatccaaagtgaagatattgtaaaatggtgtaatttaaccatatgtgtgagcatctcaggttttcataacatgtgggcactcactcttccaagattgtttggctagcataatgctgacttttttggcttttaataattgcttatgaatagtataaactgtaaaatagaaagctatttgatttgacaatagcaaaatattcacaatttgaatgaaataggtatctcttcacttgggcttttaaaaaacatataaatactgtatttcattgaacacattaaatccaaaagcaggccattacctgcagctgtctaatggccagatttgatacatactacagacaattacagtttctttgttcttactgtactgtaaaataagttcttccacatacttgcctgggaagttttgaaaaataaagcctaacttgaaaattatgaatcaagatttctttcaatattaaaaacagtaatagcgctcttggttttattttatagttaataaaaatttagatgaatgaagcttttcctctcccttttaggacaagtctagattatattttctgtgctaaattgaaggttctttctccaatcattagaatgaatgaacatgcattaagcctctgttaaaagctactaaggagtagtgaagtcagtgttaaagtttatttcttcttcttgctcatatcactaaaaataaattgcccaaaagatgtatagcaggaakgaaaagaaaaatcaaataatattgaaaagtacayatgagaataatcagtcaaaataagcaaagttttccttgccttaaaaaaagaatctaccatctgaaatgcctacttgtttaaggaacaaagagccaggtctccctctttgtagatctcacttatagatagtatttggagagtgggtgagtgagcaagaaycccgaatccaaacgtgggcagcagacctctctctggctgctcctttgctgatcagggcccaggtaaaactttttttttgtatactttctataacttagtaggtttcttaggagaataatagatgcatgggaataataacatttacattttaagttcccttatctgttaggccatgattgtgccaaaatgattaaggtgagttgagattgagagtacaactgaatctgtatgtctctcttggtttgtgattaatctgggtgatacttgattgctgaatatttctgtagagatttagagtatcttatacatgcctggcataaatacagattggaggcaggatgtttttagttggtttctctaattttattanctgcctaaacattttaagaaatatattcttttgcttctatccctttacccccaaatgattcaggtgtaggagctgcacgatctgggaacctcacgtttatggtgggaggagttgaagatgaatttgctgctgcccaagagttgctggggtgcatgggctccaacgtggtgtactgtggagctgttgggactgggcaggtaagatttttacattaatgaccttgacttgatgatgtaaaattgactaatgttcctttctctttcctgaccatatttttattcttctttcttcaacctatggattctttgctcagattttaaaacatttatttggaataaattagttttgcatcattcctggtgggcttaagcagacatcagccaatttacttatttaaaaaacttccattattggccagacgtgatggctcatgcctgtaatcccaacactttgggaggctgagacaggaggatcactcaagcccaggagtttgacaccagccagggcaacatagtaagaccccatctctacaaaaaacaaaaaaattagtcgagtgtggtgacacacacttatagtcacagctacttaggaggctgaggtggggggatcacctgagcccaggggtgggggattgaggctgcagtgagccatgatagagccactgcagtcagcctgggtgatagagcaagaacctatctcaaaaaaaaaaaaaaaaaaaaaaaacgggaaaaaaaattcattattaggatcttgacatgtctgtcatcccagcaactagtgaaatcatccttaaaactgctcttattcgaagtgcttgtttctgagttgctattttcctccatctaattttgtaattacagttgacccttgaacaacacagatttgaactccatgggcccacttatacatctattttttttccatagatatattgaaaatttttttgaagatttgtgacagtttgaaaaaacagatgaaccacatggcctagaaatatcaaaaacattaagaaaaagttagatatgtcgtgaacgcataaaatatatgtagatagatactagtttataaatatgcacaaatctgttataaagagttaaaatttatcaaagtttacaaatatttatagaccatacatggcaccatttacagttgagagaaatgtaaagaaatgtaaagatgcattaaatcataatggcataaaattaactctagtaatactgtactactgtaataattttgtggccacctgttgctattgcagtgaactcaagtgttacaagtattgggcataaaatgtcatgtgacactaatcatctttgtgtgagtggttcatctctttagtaaattgtgtatcatagtaaaaattgatctcttggaattctcttgtatttttttatcatgtttagtgcaataccataaaccttgaatgacaccatgggacccatacaaagtgccactagtgatgctggaagtgctcctaagaagctgagaaaagtcatgacattacaagaaaaagttgaattgcctgatacataccatggattgaggtctgcggctgcgtttgccctccatttcaagataaacaaatccaatgtaaggaccattgtaaacaaagaaaagaatagtcatgaacccatcactgcagctactccagcaggcttgcactttttgcagaacatctttttatctcacattgaaaatgcagcttttatgtagatgcaggattgctgtagaaaggcatacttacatctaatatgattcaagaaaaatatgacaacttaaagcaaaaagaaagtgaaggatctaaagctggagaatttaatgccagcaaaggatggtttgataattttaggaagaggtttgcttaaaaaatgtcaagaaataggcgaagtagcttctgccaaccaagagacagcagacagttcccaggcgccattaagaaaaaatcattgaagagaaagtatatctgcctgaatgagtttttaatgcagacagaagtgccctattacggagaaaaaaaaaaaaaaaggatgctcgaaggacatttattaggaagagaagcaagcagcaccaggatttaaggcaggaaaggataggctaactctactgttttgtacaaatgcagttgggttgawaatcaggactgcccttatctataaagttgctaacttctgaggctttaagtgaaaagataaataccagctgcctgtcttttggttgtacagcaagaaggcctggacgatgagaaccctgtttctggattgtttccatcaatggctttgtctctggagtcaggcaatatcttgccagtaagggactgacttttaaagttattttgatattggacagtacccctggccacccagaataacatgagttcaacactgaaggtgtccaaggggccaacttgcccctaaacataacgcccctaattcagcctctagagtaggggatcataaggacctttaaggctcattacacatggtactctatgggaaggattgtcactgtggaagaaaaccctgatagaacatgaaaatctggaaagattacaccattgaagatgccattgttattgtggaaaacgccttgaaggccatcaagcccctaacagtaaattcctgctggaaaaaactgtccagatgttgtgcaagacttcacaggatttatggcagggccaatcaaggaaatcactaaagagattgtgcatatggcaaaaaaggtggggagtgtatgaaggctttcaagatatggatcttggattaattcaagagctaatagacaccacagcagagtaattaacagaagaggcttgatggagatgagtgcttctgaacagtaccagatgatgaggaagaagatgtaccaaaagcagtgccaggaaacaaattgacattagacagtatggcagaacggttctgattattcaagactcctttcaacttcttttacaacatggacccttctctgatacagacactgaaaataaagcaaacagtggaagacggattggtaccatacaaaaacgtttttagagaaatgaaagagcaaaaacatcagatagaaattacaatttccataaagttatccggagtgtgcctgccccttctgcctccccttctaccacctccacctcttctgcctctgtcaccccgagacagcgaagagcaacccctcctcttcctcctcagcctactcattattaagatgatgggattgaagacctttatgatgatccacttccacttaatgaataataaatatattttatcttccttaatgattcccttagtaacatttttttctctagcttgctttaccataagaatacaatatataatacatatacaaaatatgtgttaatcaactgtttatgttattgacgaggcttccagtcaacagtgggctattagtagttaagtttttggagagtcaaaagttatacatgggtttttgactgcactgggggttggcacccctaaccccctcatcattcaagggtcaactgtacttgccatagtcctctctatttgtagtacaatcacgcagcaataacccatggacttcaaatttttcttgaaaagcaagtaactttcatttagaagtatgaggtgactgacagagatgattaaacaatactgaacactgaaattgttagttgtctccctccccctcccaatacacacacacactctctctcctcctcttaatgcttttatcctggtcactaggactctctttatctcactctagacttggtattatcttagatatatttattgtctccatactcttgtccagtcagtctccaagctctattacttcaagttactctcattgttgaccttcatttccattcaacacaggacctggtccaagcctttctttcagtgtctcacacctagtttactggtcagggggcctaatagtctctgaatgtcaaatttaccactctgtccaacatcataacccagaccaactccatcaagatgcttgtatcatcatagtgcttccccattctgaaactttgaatagatccctatttcctaccgtgtcaaattttaactctccaccctagctttcatagctgacatgtccttgccccagtcttaacgatcaaatttctcaccattccttaaaacacaggcatattaaacaattttcttactgatctccagcaacatcccatgttcttaaatatttaatccttcttatatatttacccttcgccccggatctccttctttctctttcttgtctgtttaaatcctgccttggcctcctaaaggatgatttcaggttccacttcctctctgttcctgccttcagtggtcttgttgctctgaactcctatctcttatagcctctaccttayaattcaccacttgtttttgttgccttttcatacagcatattactcccatttccaattagattgtaagttccatcccttaaagagcagttgtgccctatagtgctgagcccgtagtagctatgtggaaaataaattttcacataggcaaatttattacctagtggaggagacccgcaagtctgctctgggatagcatgtgaggttcagagggagccatgctgcatcaggttctcttccscactcgagraaatcaacagttgaatgttatttcttttagaaagcagcccctggaattgggcaaggaaaaacgtcctgtgagttttaccttgaaaatacrgatatttaatatgtactcaatttattttcaggcggcaaagatctgcaacaacatgctgttagctattagtatgattggaactgctgaagctatgaatcttggaatcaggtttgttgaatagtacgtttttatactaacatttttataggctttcctatttgattttctgatgttaaaaaaatgatattcatgagagataaatgagttgatccaagaacattttgaaagtacttcattattgaactttaatagactttgcttattggacaagcaataggacccaggagagcatgaatactctttgccatagccataaaatgtattgcctgtgcatttgaagttgtgcatttgaagctatattatcctttttatgtgggacccccatttcttctattatgttgaaatacaagaaacacttttctgtaaaatttaaacatactttggcaatgttgggacaaatttgtataagacatggttttagtgtgtagtgaattcaagtggtatgctaccatgtgactagtttatgtaccttttaaaaatatagtcccccaaatctgcactaaaagtgttcttggtggttcattctcaggctaaaaactggatagcattcataaagatgcaattcatatgcataactctttcattttattttgcctgtggtttagttactttgcattcgtatgtatctttctattaaagtggcatactttgcttaaagtgattcaggaattctgtttttcctatggatgatcatcttttaaatgcttaaggttaatgtcttaattttagcctttaatcttttgggttagtaatgctacatatgattaatcacctaattaatttttgaatgttttatatttcatgaaaataataaatatacatttcttactttagaaaatgcttaatgagcaggatgctttactcagttgctttcatcacattccccaaaactgcttaccaaatayatcacaaaacagaatagtgtttcataccatagcttttgataaaagtaataaaaagagccaacatacttgagatatttttgaaaacacagtaatggattcacatttcctcttaattaccatatcaagatgctgttgttttattgaattgcccttgtctcagatgtttaactatcttgacctattaagttgtcatgttgtaattgagataaaagaggaatttgctttgcgtcagcactaattggtttatcaatatcatgtaccatttacattttaaaattgaatgtccataagatggtaaagcatgtctgtacagagccttaataaaagtggtagtatatagggaccttttcagtgttatgtttgtattgtggtcagttttaggatatgggtcacttatcataattgaaaaactggttactagtaacttgttttcatgttcattctctagactaatttcatggaagaggaaaatgtacatttctggaacataaatggcatacacaattaattggtgttgacaccaggattggtatgcatatgtatgtttagaattttatttttatttttctggatataaatgattatataaagtaaaaggctggatgaacctaggttatactgtactacagctttccctctttgcccattgactctgtgcttctcaccttgagcatcactggaccaggatgttccttagtcatagtgatgcatcctctggcatttcttgaataattttcctgtcagaactcttactataagatgatcatttgaccttctaaaatgaagttttgtataggctaagtgcttgtggaagttctactgcaaacaccagctacaactgtaggcaatacaatcgaatacgaggtgtacaatgaagtaaaaaccattggctacttgtagtgggtttgttttcaaggagaaaatgaaaagtgataaaaaatagagatgtaagagagcagaagcaattaatagagtttcccttatttttggctctgatcaactatgacaaaattgttatttagaaatatgaaacttttaaatctttcatttttctaaaactctacatatatactgatatatataacataaaatatattctaaaagtctgaacacaaggcagaaactcactagttatacttaactgttaaaaataatttataagtttctagtgtttcagattataccaatgaattgcttattttcataacatgaggattttatcactttatcttacgaagattctcagtggtttaaagaccctaaaaatgaatgcttctgctattgtcttttcttcacggtttacagacatggtttaaagtgacaggattgttctctaatagagtatagagaacggccacgatttattgagctttgcaaggtgaaagagaaaattggcatcagcaagcataaattcccaagtagtaaattcccgcaaagtagtatagcatcaaaatggtgtagccacatttatattctgcccactctgaagtgaaattttttcagagtattaatgtcaacatttacaaattgagtcacccattcctgtgaagtgatcatttctgattaattttattctaagccagtggtttttctggaacactgttccccttttttaaaaaaattgaagaataaaatcttacagtttaaaattcttattgaccctatgctcttttacagtgagtctttatggatgttagcaaaatttttaaatgttgttaaaaaaaaaaagtaaagagtaaaaaatatggtatacaatatattttgagattccttttttattagacctttctgctttctaattggattcctacataggcattagaagcatagttttatggtcctgaaagtaccctacttgtattagagaggttttgttcctgtgtatcacatagaaataacattgatgatgttttgttgttttaaattaccagctccactggaaattgattttaaaaaaaaatttttggtggtataacaagttacttgcattgccaaccaggcccaggctcctccagcaaccactgtattgtcttccgccaaaagaagcttgaagcagctgaacttctggaaagctgttcaagatgagaactttccctccaatgtagttttattaatagtttcttgcatactgcccttagaagatgttgcttttgcatttatgtgatgactggagccttagttgtttaccctaataaatataacagatggcaaaggtttgtaatttgtaaatggccaaaaagcttgttctttgtatgtatctatactgtctggttttacataagaacaaaacaaattatgtcactaaactgggatgtttgtgtcacaggaacagatctggaaatgaaacatctaagaccatgtcaatccaaatcattcacttatccatcatacaaatttcttaataaactcataaaatgccatcgtactggctagttgttgactattaagtttaccacctacttaatagtcaactactagccagtacgatggcatttgggcatacatgtaggtctgcattcaagctgtcccacagacttaagcttttctcatttataaaatgacaaaagtgattacatctatccactgggttgttgtgaagattaagtgagttaatccatataaaacttattaaatagtttctggcacatagtaggtgtcgatatgtggtaatgatatttgtggttgtggtgaggtggttattgtttgaaattaaattgtactttaatctttttcttcctaacatgtctcactagctggcattacatatttatttgtctgtttattacctgtcttcccatctagaagctccatgatgggaaatggtttgtttactcattgccatatcttaagaatatacctggcaggtattaggcacccagtgaagatttgtcagataaataaggagaggagggaggaggtaggggagtgagtgagtgaggggataagatatggcacttctcttgccaaaggtaaaagttatccaggtgggtcttaactcagccctcctggcagacaggcacagcctcctcttagcttccttcttactgtctccttcgctgcacgtgtagcacttggatatagcagatctgagtaaacattgatggataagtgattgattaattaaaactgacatggtcttagatgtttcatttccagatctgttcctgtgatacaaacatcccagtttagtgacataatttatttcgttcttacgtgaaaccagacagtatagattactcacagataatataaacaaacatttttggcccttaaagtcttggttacagtgaaggcaaatgtttaattttttaaatttttttgcagtttatgcattatttttacttcttccaaacctcatttaaaattcttgttttagaggtgagtagatttgacacagtgacgtttatttgagacgcattatatatgcagtcagagcgatgaattcattctgtttatatcagagaacattccagcaattgtaaagccacatgcatgcacgcatgcactctcgaaccacatccagtggcaagttattatggggactgacagactgtcattcttttgatggcttgagctgtatatcttctgaacagcaatggggctcttatgcagaaagtatcatatgttcccagccaatttacagggaaacagcaataacattttatcatggttgagagcccagtagctgcttcctattaaacttgccctttcagatacctgtcttggattaatttgttgatttcgaatggaaactcagtcttctccagtgaagcatgacgttctaggatagactctgaatgacaattactgtgtattctagctggtttcagaccattacaagccttgggcacagtggaaaacagaggacttcagtaactgattttaatatcatgtctaattttaactgtcagttatgtatgtgccagagaacgaatcctcagaaagatgaaatgcaaaacacttctaacttgctctttttaatgatacactttgctgcgggtgggggcagggggagggaagtggagagggaataactatctcctgaagggaatcagcacggtggggaagcatcagatttgaaaagtgagaatgaaacaactgccacctgattttttgtgtgtgcccctcaggatgcttctaaatagtaatgtgttcaccagaaagggtttccatcaatcaataccagtacttttccttgaacattcaagaaaaatgtagggttttacaaagttaggataattagctttgctcaccattttgttgaatattatagaaaagagtgaatttccttagctgtaaaagctcttgtgagctactactgagtgtaacctggtagattagaaagaaggaaggaattctgctgctttaaatatgatgaaccatcttaaaagatctaagttaggaagccctgaaattatatttcaaatggagagagaaagtgacgttttggagtctttaaaagtattttctccttatggagcatattagatgtatgcattcttgaacatttggtactttgcagttatagcaaattaactaattgttaattgtgattttacttttcacaattattccctaagcacactggctttatcttttcctaagtgatatactacagtagcatactgatagcctaatcttatttaaaaggagaaagcaagcatcagtagcatactatgcatgcagtgaacttggatctttataaaagaatgaatgaaactgttgggtttctctctgggaatctacagttgaacagaatgaatgatagccaatttagactgaatttctgtatctgttacaatccttagtaaaatccatcactataacatgggccaccatatgaattcagatacatgatatgccacatagcagtctgggaaccacagctaccccttgaaagcctgattacataacagttctattatgtggtaattccatacatatttttggctgttagcctcagccccctgctctagcatctgaaaaaatgttttattggccatgatattcagattttgaaataaacaggcatgtgttttagacacacagagtaaacaatctgagcgtgccaagatgcacagtttgtttaacatttacataagtgtctcttttcagtgttttttttattttctggaagaggttggttttaagaaaaagcggaaagcttttatgacaattgtttcataatggctctgtgtatgaaagaaaccaaataaattgctaggaataaagttttatttgaaacttgattcagtgatacctagcaaaattgtgcttcccaaactgcattatatctttagaatccaagtaatggagcattttgattctattattttttctagggtccacattgaacagccgtttatgccatcagcccagtgatagaacaaatgatgtttctgcttgggcaagctttgttttatcaggatcagtaaccttatcagcagttgacccagaactataatgcatgtctctgaatagatagcatatgtcacaactctgtgcagacttgcttcataagcaagattgtctaataaagatttaataaataaggaaaagtttgcagcaaaaatgtcttcttttataataacttttcttaagctcgtttacagctcctggctcatctcttgcatttattctcataaaaactaaaggaataaacatacatataaatgcattcacacagactcccatgatgcatcgtttatctgtcagtatttctttctgaaatatatcatttgtgggtaaagaatgtagaatttaaattatcatattgttttaaggttcttatgtgacatataaatgtagtaatgtccaaagactagaaaacccatgagtgtgataaaccaacaatatttttatgcaattgtatattattttttcttaataataggataacatagaaggttttctccaaatgcaaaatggtcctggctcaaaaatattcttatttaaccagtagtgtttagtactctataattcaaaattggattcttcactctcgtatcaayctgcttagattttagaagacatataataaatggasagagaagatggagcatccccatacataaataagtcacgcacgacgtgtacattttgacacttaacacttcttttctttgacctttgacaggttagggcttgacccaaaactactggctaaaatcctaaatatgagctcaggacggtgttggtcaagtgacacttayaatcctgtacctggagtgatggatggcgttccctcggctaataactatcagggtggatttggaacaacactcatggctaaggtatggtaaatgtagacacccaagagagaaggaaaaacgtttcacggtccartaacaccttccttctctttctcttaataaagcatatgtctcaggtaagaggcaaaattactagaatattcactctcactgaaaatgartaaaaacctaacttagatgaaaatccttatcttgttcatttttattcctggccttttggttgagaagaatgggccagaccatgtgtgtgtgtgtatgtgtgtgcgtgtgtgtgtgtgtgcgcacttgggtttatttatatgagccggtaaaatttcgttcaccattaatttatgttaatttaccaacttcttaaatgagaacagtgagaattttctcattgttaataatacactggcagtgcatatatgcatcacgaagagaggattttcccattgataatagatttccaaatacatcttcctgctttaagattttaatatatggatttatatataaaaactagttaagtcattggaaaagcaaactgtcatccttctcttatttgagatctcaactttagaaagtctatgttctcaactacagaaaataatttttagaccagctaactttcagatttctgcagtgcttattttctcccagttgagggttggtttttktttgtttgtttgtttgtttgtttttcctgattaaaaagtaagaatacggccaggcgcgatagctcatgcctttaatcccagcattttgggaggccgaggagggcagatcacctgaggtcaggagttcragaccagcctggctaacatggtgaaacccagtttctactaaaaataaaaaaaattagtcgggcgtggtggtgcgtgtctgtaagcccagctactcaggaggctgaggcaggagaatcgcttgaacccsggaggtggagatggcagtcagctgagatagcaccattgcactccagcctgggcaacagagtgagacttcgtctcaaatagaaaaaaaaaagaaaaagaatacatatacctagataccacacaagcataccttggagatattgtgggttcagttccagacaaccacaacaagtcacacaaattttttggtttcccagtacatataaaaattaygtttatactatgccatagtctattaagtgtgcattagcattatgtctaaacaatatacgtatcttaattttaaaatgctctattgctaaaaaagctaacaattatctgagccttcagtgagtcatatagtccttttttgctggtggaaggtcttgccttgaggttgatgaatgstgattgaccagggtggcggttgctgaaggttgggtggctatgacaatttcttaaaataggacagtaatgaagtttaagtttactgcattgatttactcatcctttcacagaagatttatgtgctactgtttgatagcattttacccacagtagaacttctttcaaaaacggaggcaatcctctcaaaccctgatgctactttatcaactaagtttgtgtaatattctaaatcctttctgtcatttcaccaggagtagatccatctcaagaaaccactttctttgctcatccataagaagcaactcctcatcccttcaagtttagcacaagattgtagtaattcagtcacatctgcaggctccacttctaattctagttctcctatttccaccacgtctgcagtgactttctccattgaagtcttaaaggcctcaaagttatccatgagcattggaatcagcttctttcaaactcctgttaatgttgatattttgacctcctcccatgaatcacaaatattcttaatggcatctagaatggtgaattattttcataaggtttcagtttactctgcccagagctgtcagaggaatcactatatatggtagctattgccttatgaaatacttctcacataagagttgaaaaatgactctttgatccatgggctacagaatggatgttgtgttcatagacatgaaaacaacattaatctccctgtacatctccatcagcactcttgggtgaccacgtgtactgtcagtgagcagtcgtattttgaaaggaatcttttcttctgaccagtaggtctcaacagtgggcttaaaataaatattcagtaaaccatcccataaacagatgtgctttcttctagactttgctgttccatttgkagagcacaggcagagtagattcagcataattcttaagggccctaggatttttggaatggtaaatgagcattggcttcaacttcaagtccccagctgcactggcccttaacaagagggttagcctgtcctttgatgctttggaaacagacattgacttctctttagctgcgaaagtcctagatgatatcttccaacagcaggctgtttcatctacactgaaaatctgttgtttagtgtggctaccctcatcagtgatagctggatcttctggataactaacttcctgcagtttctccatcagcagttgctgcttcaccttccacttttatgttatggagatggcttctttgcttaaacctcatgaactaatcactactagcttcacacgtcttctgcagcttcctcacctctctcagccttcacagaattgaagaaagttagggccttgttctgggttaagctttggtttaagggaatgttttggctggtttgatctatccagaccactcaaacttwctccctatcagcagtaaggccgtttcacttatcattcatgtgttcactggaatagcatttgtaattttcttcaagaattttttctttgcattctactgtttgttttaatgggcctgcctttcagcctgtcttgattttctacatgccttcctcactaagcttaatcatttctagcttttgatttaaagtgtgagacagctgactcctcttttcatttgaacacttaagaggccattgtagggttattaattggcctaatttcaatattttgtgtctcagggaatagggaggcctgaggggtaagagagagagagctgccattcagtggctgggcagtcagaacacatgtgtaccacatttatcgattatgtttgccatcttatgtgcgctttctgacaccccaaaacagtttcaatagtaacatcaaagatcactgatcggctgggcacagtggctcatgcctgtaatcccagcactttgggaggccgaggcaggtgtatcacctgaagttaggagtttgaaaccagcctggccaacatggtgaaaccctgtctctactaaaaaaaaaaaaaaaaaaaaaaaagctgggtgtggtggtggcaaatgcctgtaatcccagctgctcaggaggctgcgggaggagaatcgcttgaacccgggaggcagaggttgctgtgagccaagattgcgccactacactccagcctgggcaacaagagagaaactccgtctcaaaaaaaaaaaagttactgattgattgcagatcaccgtaacagaaataatagtaatgaaaaagtttgaaatattgtgagaattaccaaaatgtgacagctgcatgaactgggcacatgctgttggaaaaacagtgctgatagacttgctcaatgcaggattgccacaaaccttcaattattaaaatacaaaaacaaacatgcattatctgtgaagcatgataaagtgaagcacactaagacaagatgtgcccatacttggcttactctccctcattccccatgacgtttgttcattctgcttcttgaatatgccttgaattcatccagctccctcctccccagctagctgtaccttggctgagcctcgtttgtgttgtaccacaaatacatcttaactgatcttgtctttcagcctgatcttctccagtttattttccatatcaaagcaagagtgagctttctaaaatgtaaaatcctgattgtgtcacttctcctttgaagcttttgtagtttcagttacttggagattaaagtccatccctgcaacttgtctgacaagcccccagatgccttggcttttgcttgcctcaaccagactgattttctttcccatccccctctccttgctttcatcgtgctgaactcacttctccctcttgttctgtctcttggaaaccttcacatttgctgtcccgtctgccaggatggatcattcttccttgcccaccacctccctgccacccccatgttttcacctggctccaggtctgtgcttcactgtcttctttttcttcacctttcccagcaccccagaccctgcttccttggatcccatgatagtactcctcctatccaattataccatgyttatttaattgtctttctccttaacacaatgtgagtttgggtgggctgtggctgttttgctcatcattttatcccagcttctggcacattgtcagcacacttcaaatatttattggatgaagtaatatttgcaactgtatttcctgttttgcagttttatttctccttgttttcatttaagaatttttttaaaaaaatttatgtcttaaagatttccacagataagattacacagggaaattttttttcttcaaatctgtggaacaaaacaaacaggtattgtggaaggtggaaaaatcgaagagacactcagaaatcaaggtttctgtctggagcaattttgcagttatatgaaagygcttatttaaaaatgttaacttaccatagtatttataagtaycttattttttcagattacatttttccttctttcaaaccaaaacataaggaascacagttccaaagagcctttaccaccagtctcagcgtgttctctcctcctgtttgatttaggatctgggattggcacaagactctgctaccagcacaaagagcccaatccttcttggcagtctggcccatcagatctacaggatgatgtgtgcaaagggctactcaaagaaagacttctcatccgtgttccagttcctacgagaggaggagaccttctgagtgtgccctttggccacggacactgttgggaaccaaactctgtcttggagcctccttttagctcactccacaagtaaatggatttaatcaaaggtcacctatctgcttttgattgtctaggtcacagtaatccctaggatttttcaccgcttattctttttgtctttttaacaaacatattatccgaattttttttctgcaagccactgatagtctctgctaactagcttaattgacctttttacaaagtttgatccccaagcatcctcaactaaatcattgaatacttcaatcaggatattatctgctttactttacaaataaaaccaaatcttttgtcaacaggatgaaacccatcttaaaggaaagaaaaggaattggtgtgaagagagaagttagagaagggaaatgcagtgaattactatctgtgtccatcaggaagtttgtcctgttaaccaaatggttactgcactaccagggttactggtttattttccagggagctgataaagcaggagaactgttgctgcatgttttctatttggactccgtcacaatatggtaggatatccctcaccaactcccgacactcagcagacttgtttttatatttttttctttcttgtwcattcttactacgtattttttgacttaagaatgacatctttagaygcatttcagagccaatgatgatatttgctttagataattattatattattataaatatagccatattattttgaattcaaataaatttctatactggtaatactttcttggtgtttttgtttcttccccatcatttggtgaactaatgttctgacaaactgatgttcacactaatggggaaaggatgggaataaagagaaaggaggggaggtcaaaaggaacaaagctctgagttggccagtggcaagctagtgttttgctgctttacctgaatccttattgagtattcgtttgaatggtttttaggtcatcagttctctaggaattcagccagcattaagtgtaacatgccccaatatggagcacagtcaccacttttcccacctcagcctctagaaacattccaggtaatagacatagacaccaaatttggcagaagtattactactttcatcattttactggtgataaaaaattccaggcactgttataagtgctggggatacagtgatgaacaagacacaagatttctgcccttgcagagcataagttctggtgtctcatgtgtttgtgacagacaagaaatatgtatttttcagataagaagaactaaaaagaaaaagcaggataacggggatggatagggagtgccaggggtattttcttagggtgataaggaaagttctccccaataaggtgtcaattgagcagaggtaagggagtaagcaatgcggtatctgaggaacaaacattccaggcaaaggggacagaaagtaccaaggccctgaggtaggacagtactgaatatgaggaataacagggaggctataagtgaagtggcacagaatgagggtagccagatcatatggggccttgcagggtatgttaggacactggcttttattctgagcaaaatgggcaatgtatcagttagcttttgctggataacaaatcaccccaaaatttagtggcttaaaacaacaaacatgtattgtttttcaagattctgtgggttggccatattattattctggcctagaccagctcatctgcagctagagtgtctagtttggctttactcagctgggacagctggaatggttggggcttctctccatgttttcatgcattctccaggaggctggtatgaatttgttcacatagtggtggaagcatcccagcagcagcataggacaagccctgactttctaagcctctgcttgcttcatgtttgtactttccccttggccacagcaaatgtcatagccaagcccagaatcagcatatgtggggtctgcataagagtgtggacacaaagaggggcattatggtggcctttttgcaaacagcctatcacaagcagcctgtgaaactttttcaccagattgatgtgatctgacctacttttttaaagggatcactctggatgctgtgtggagaagagtctgtaggagcaaggctggaaacaaggagaccaattcggaggcaatagtaataatccagttgagaggtggtagctgggaccagaatgttaaaatgatggaggaggcaagaagtggttagattctgaacctagaaaacagagccactaactgatggatggcatgagagagaaagtagggagtcagggataatcccactgtcagtggcctgagaaagcagaagaaagaagttgccatttcctatatggggaagatcatggggggaagatttggggaggattgtaggaagtttaggagaaaaaaatcagagatttatatgagatgccttaatagacatctaagtaaagaagaacaacagtccaaggactgagccctgtgttactgtaactttagtggttaggaaaatgaggggggacaagcaaatgagactgaagcagagagatcagtaaagtaggggaaaaacatgggagcagtgtcccgggagccaaatgaaaacagtattttaaggagggaatgatgatctgtgagttgagtaatagggctgagaatcatttggatttggcaaaagagctatcactggtgactttttcaagagttttggtggagtcttggaaatgagagttggattgagagtgggagaggaattggaaacagtaagtatagagaattcttgaagagctttgctgcagaggaaaacagacaaatgggatagacattggcagcaaataagggaccaggaggagttttattatatttttaaaataggaaatgttatgggattatacggatggaagtggaatgatccagtaacgaggggaagtaatggcacaacagagaggctacttgctaaatgctgcctttcgagtagttgagagggaaggggtttaactgtggccaaatctctgcaaattaaaggaaccagcaaaaacagatcagatcacatttcagcccgtcagcatcttacgtgaaggatagaatagaattgtaatcaattatacagttttcaacacgaacaaaatatttgtgctggaaaggaattacctctgagtgtgaccctatacaagccaccctctactgaccattcattttctcatctatgaagttgtcataaaccatctagcttaatattaaatgctttctggaaatgaaaacaaaagatataaggacaatcacacatgatagcagcatatggaaaaactggaacccttatacattgctgctgggaatataaaatggtgcagccactttggaaaatagctcggtagttcctcaaaaggttaaacagtgttggcacatgatccagcaatttcactcctagatgcataagaaaggaaaaaaatatatccacacaaaacttgtacacaaatgttcatagcagcagcattcataatagctaaaaagtggaaacaatccaaatatcccccaactgatgaytggatgaacaaactgtcatatctgcacaatggaagattgcttggccatacgaaggaataaagtactgatccatgctaccacatggatgaacttaaaaacataccaagtgaaaggcggcagatgcaaagggccacatattgtatgattctacttatttgaagtattggataataggcaaatccatacagacagtagatgagtggtttccaaggactggagagggggaaatggggagtgactgctaacggatatggagttttttggggggagtgatgaaaatgttctggaattaatagtggtggttcacaactttgtggatatattttaaaatcactgagttgtatacttgtaaatagtgaattacctctcaatttttaaaaagcctaaggaaaatatcatgagttaagatcttttgataagtggttctcaactgtggcagttttgcttgccaggggggacacatggcaatggctggagacatttttggttgtccattttactggcatttagtgggcagaggccaagaatgttgctaaacctcttataatgcacgggacagcacccacaacaatagttatcctgcccaaaatgccagtcaggcaaagtttaagaaacgctgctctaggtgtatgttccacaagacctgaactcagcatatcaaaacctgagctcctcattttcccccaaagccctgcttctccttctggtcctatcccacgactcctcccaggctttcaggacccatccctgactcctccattcctccacccattctccttagctaattctaaatctctagtgcctattataggccctcaccagttcttatctagggcagcagtccccaacatttttggcaccagggactggttttgtggaagacagtttttccatgggtggtggttggaggaatggttttgggatgaagctgttccacctcagatcatcaggcattcgattcttgtaaggagcacacaacctagatccctcacatgtgcagttcgcaatacggttcaggatcctatgagaatgtaatgcagctgctgatctgacaggaggcagagcttaggcagtaatgcttgctcaccggctggccactcacctgccccgcaacccagttcctaacaggccacggaccaggtcagtactggtcctcagcccgggggttggagacccctgatctagggcacttcagtatctgcagcgacaccttttattttccctaacagctttttaaaggtatagtgtacatacaatgaaatttgctccttttatacaatgaatggcttttcgtaaattgagagttttacaaccctcaccacaattcagttttagaacattccatcacccctgcaaaatcccgtgcatccatttgtaatcactgctcattctcccggcccccagccattggcagctactaagctttctgactctagatttaaagctgcttcttggccaccagcctrgttttatttcccaattgctgagcactgctgcaagagaggtctttctaagactgaaatccaatccggccaaccctgtttagaatgtttgggcctaggatacagtctggtctccaaagccatcctgctggggcttctatttcaccagcaccactgcccacaatacttgtcttttcccaaacgtgccatgctttgcacacctcagtacatttgcacatgccatttcttccatttggaatgccgccccttctggcaccgtgaccggttcagcactgttgtcttctaaaaagccttcctcagcaacttcagactcagtcgtttccactctgttttcacagcagtttgttgacatctttctcatcataggacttgccctgttacattatatttgcagctttgctcatttgtcttcctcaccagactgtgagctggacggcacagaatgtgtcgtatcagctttgaggtttgcgttgagttcagcacctagcattaagagctcaataagcgtttgaataaatgaatgaatgagtgaaagctagggcattacatttatgttaggtgaattactgactgcataaacgttttcttaaagattcttgcttagcagaccaagtttattagtcaaaagtttagcttatgctgctaaaactggagaaattctggaagagagagtatgcatttttggtagcaagcttagtctaaacttttatgtacttgcatacagtaaagcatgcacctattgccccttatggagtacagcagttgcaaatgtaatcttacataacatgctatgtagaccttgagacatgaggtgaatctcagaataatctaggtttgatttactcaagggaatctgtaaataggtgtatgagagactctttgccatcctactgatctgacaccattataatggagcacacggctcagccacagctgagtccacatgtaagtgaacaccaaatgaactgggcctactccttggccattcttcacattacacaaatttctatcttgttttctaagcaatcagaaatgtgtatattatgtccacattataggggggagaaaggcaaatctgagcagagaatggggcaaaattatccacgtgcataaattctacccaggctactgtcagaagcctgctgctgctcaggaaaacagcacgagttactaccagcctcagctgcggtaactgcacccttgagtattctcaaatggccagccaatggggaggcgtctgcttgagtggggtttttagccatctttcagttcaattgaagagggagcttaaggacatcatagggatttgtaacattccatgcaaggtgtcagacccataaactagcgtgtccatcataccgatgcgcaagtggaatcgtctctcattggtggcakacagactgaagatgaccttttgctatgtaattgtattcatcatttaataattcaagaatatctaaaggggatgaacacttctttattcagattagagcattaataggaaaacacagtaaatcagaagccctttgcaaccagcctacagggagtgctttcgaatgccttggttacaagaatggttcccgggctgggagacaggagacgtgagttctagccctaggtcagcactaagctgtgtgtgttgtagatctgtttccttctctttaaaatgagggcatcccattgatctttaaggtttgttttagctctaaaattctgattccccatagttaagggtttaagaaaacatgaggcatgtgcttct

SEQ ID NO: 95835 - DNA, 44768 bp, Homo sapiens
  misc_feature (1)...(44768): n = A,T,C or G
tgaccatctgaaagccaaggagagaggcctgaagaaaccaaaccttccaaaaccttgatcttggacttccagcctcaggaattgtgagacaataaatttctgttgtttaagccaccaagtctatggtattttgttatagcagccctgggaaacaccaagaaaagttagaaacatctcaccatattctggagttgaaaatctatctgtatcattgttctttctccattttcaactaagtatctcttaatccagaaataaatatgaatattaaggaagaaacttaataagaatatttcattgatcaccaaatttgtgccaggcattgtactgggtgcttcaaggaatgtcattttgttccccttttaacagctcaggaaacaggatcagagaggttacgtaatcacccaaagatcatacaattagcaaaggggatgagacagcatttgaatgtagatctaagagaattcagtggagtagacaaagcaaaggctttggagccatgtgacttggatgtgtacccaagtttgttgctaagttctggtatcagtcccttgtcttccatgaggctcattttcttcaactgtaaaatgaggatactactacttaccttgcagggttagcaagaaaactaaatgaaataacttacaaaggaacaaaaacatagtagctatttaaaaagtcagctcctctattgtagcttgtggtagcaaagtcaaaacaagccccagaccccagtactagcagtaactgtcttatgccagcagtggtttttgtttgtttgtttcaataaagaaaaagcttatttttgtattgattgatatgtcattattttaaaattcagtaaacatgtctatcaggtgagtgactggcctgcctctgagcctgggcctgtgattgagtgcttcttggaatgtctgtgctcaccagtgtgcatgggataaaggaaaaatcaatttaagactagcctggcctaacaggtcagaactgagctgacagacactagggtatgggaaaatatatatttgctcaaagagtgctgatttcagtctatattcaacttgtatttcttaaataaatcgccattcagacagggctaaaagtactgctcagctacagttatctcaaaattaagagtttaattttcaaaaaagaagtaatactcagtagtcagccacaccttgtgtcaaagcctcctccttcattttctagataagtgaccttgaccagattccccaaactccttaaacgtgttttgctcatctgtaaaatgaccacaataataactacctcacagcttggttgtaaataataaacgcaattatatatgtatagtgcttaatgataatagcatttatataacatttgctatgtgccggtcactggtctaagcacttgacttgtatctaacttagtatagtcttcacaacaactttatgaaataggtgctgctattatcctcattttactgatgaggaagctgagattcagataaattaagtaactatccaaaagtcacagagctagtagatggtagagctggattaaaacccaagcggtctgattccagaggctgtatgtgtagacagtaagagatggctgcttctgagtaaatgttcaacactcaacacttgtaattgcattaaaggaataatcacctctcttaactttgcatcattgcgctgcatttgtttttaagagaacttcgtttgcaaaactaaatcaaatacagctctctacatgctaggaagccatgtgtcagttaaaacatagccactctccatgccctcaggcctttgccgtttgatacccgctcctcttgagtatctttgccctcccactttcttcaactgttttcctatgcagctatcagatctctaccatggaaataccaatcacaggatcataaggagcttactctctctggatgtcttcaaagagggctctgtctttttctctggatcccttccagctgacgcagcacagggccacccaaagtacacgcgcaatacacgctgaccaaagaaaagtatatataaatatgagatatgtgttcaagagaagatggaaaattttaataggatggtgagatttcccatatgttgtgattatctttttatataacagaaatatattgataatgggtttttggagaagaatgttcccatattttatattaaaagtctattttgaatttaaaatatctatagaacattatatgtggtatattataaaaccaaaaaagggctgcttacccagtcaacatctccccactcctctgatttttatatgcatttctcagcttctatgttcaggacattacatcagctatatatttctgtcatcacagtgatttgtgttattaaaaacataattcttagctaaaacaaagttaaatttgagataaaccatcatccatataattttgtaagaacattcttatttataggctatacaggtgagtgtcccttatccaaaatgcttaggactagaagtatttcagatttcagaattttggggggattttgtatttgcatgtacataatgagataccttggggctgagacctaagtctaaccataaaatttatttgtttcacatacatattatacatatagcctgaaaataatcttttgcattttaataattttgtacatgaaaccaagtttgtatctagtacttacatgtggaattttccacttgtcatgtttcagattgttggagcactttttaacaaaaactttcatttaaaaaagattattgcttaggagtgggggccagggaggcagtgtataatgacactatctttgttttgctagataagtaagtaatttatgtctatttggagactttatggcaataaatgatctagtaggttagccaatttggttgccctgatggctatctaccaaaaagatttaatttgccccgtgttctacatgatttagtcatcagggacatttgggaggattttttctattgggagatatattaggttaggctgtgatagaaaatagaaacaaacatgcaaaggctcaacagataagaagtttatatcttgcttacatcacagtccaggaaggctcagattttggagcaattaggatttcagatttttagatcagggatgctaaacctgtgactgacacacagcttcctggcatgtaaagaagggccacaagaaagacatggggcatggaacacctcagatgtgatgcccaggagtttagatattttaaggattttaaacatgagaatatctaaacacgatcagatcagttttagaaattttcctaggagaagtgcagaaggtaaattggatttaagaaatgtggagcaattaaatgaaataagtcaggtacagaaagataaatattgcatgttcttagtcatatgtgaaagctaaaaaaaaaccttatagaagtagagagtagaattgtggttatcagaggctgggaagggtaaggggagatgtgtatagggagaggctggtttacggatacgaagaaacagctagattagaggataagttctagtgttttctagaacacatgtaaggtgaatatggttaacaataatttagtgtataggttctaaaagccagaagagaggattttgaatgtacacaacacaagcaatgataaacatttgagttaataaatatgctaataatcaaatatcctgattttgtcactatacattgtatacatgtattgatatatcactccgtacatatatatcactctgtatatatagatcacataaatatgcacagttattccatgtcaactaaaaagggaaaaaatccttccttacaaagatcactgtttggtaagcagtttaattcactgtaataaaagcatctcacaatgcgaaaaaaagtggggggcgtatttggaggtaatgagaagctaactgctgtttgctatcataggagaaaatatgaatctggacagtggcagtggaaattgagaggagggaaagggatgaaggggtactaagttttctctagacctcagtccttgctatctactaaaaaaacctattcttcacatttttctctatctcacatttattattcattaatatttcagaagtaatatgttgggactaatattaatgtattaatactttgtggcaggctctgtaatagtgtttaatatgcttcacctattttaattttcacctttttttttttttttagaaaagcttactttataataaggaatctgagacccagagttgaagcaaattgcccaaggttacacagctggtcagtagcagacacaagatccaaacccggtttgtctgaatccagtgctgacgtccttgtgcctcacctatccgccaccgccaaactgcttcctgttcttccagttgtcactatccttgactcattgcactttgacctcaatcaatcttcttatcttttcttaaaagaaaaacatgtttgctgtctaatcttttcaactattatccagtccatttctctttccatgtaaccttggtcttcagtccatgacaatatctatcttctcacagatcatttcagctgttcagtttttgtgccttctaaatttactcacactaaatattgtcctgaaaaattcaaaatatttctccatcctttattccctggtgctcacctgagtattttgcattattaactacttctttcttcttgaaagtatttctcccacaagagctgcaaacctgtgttctcccagcatgttgccattttaccccagcagttccttttctgtcttttttgccagttccttcatcagaaacttctatgttctgtgcatgccattagaggagctgaagttttgtttggttccttgttttctttttgtcttctactattattccctttcaatatgacccctcaatttactcttcatattacaattttaattatcatcctagagtacaaatatctattttcctgttttaatttctcaagattttgtcaagacctaatttcaaattaatgttaaagacatttgcttagcggcttaccaacaacgcgacaagacacattttacacagtctcctcatacactccttccctgctgagccagccacctttcccagtaaagaaggtaaagaagatataaaaatgattcattctgctgttagtgtcagtcttttgctcaactcccatttcccccaagtatttagattttttttttctttaagaaaataaatgccagctgggcatagtggctcatgcctgtaatcttagcactctttgggagtccaaggtgggagggtcgcttgagccctggagattgaggttgcagcgagctgggattatgccactgcattctagccaaacagacagagcgagatcttgtctcaagattaaaaaaaaaaaaaaaaaaaaaaagccaaccacttacgtttacagaattaaaattgcagcctgccgctgacaacctgagaaaaagagacaaagtcagtggaatagcccttgttatttatgcaagtccgcatacagctagccctggagttcctggagagcaaggaacctctgtcccaaacttgactcagagcttccaaagttggtgtatttcaacaagtaagcattccgttgagccaacaatttggtaggctaccagcggctctggagcgcctgttgatgatgacagtttttgtgggggcatctcaatatgacacacaattgacactgaccagaaacacagcgccaaggacactctagtcctagccatgaaatgttatgattccaggttttcaggacagagcagagtccacttctcatctccagtatccgtaaaaatttgtccaaaatgtaactaagaaaacacaatgatattagttacttctgctccccgtcaccctcaaccccactgattacgagatgggaactcacacaaaactttgagacaaaagagcaacgagtttgctttattgtttgcttgttttgttccggagtcggggccgggagggagtgcaggaggagggatccaagcttccaagcctctgctccgctctccttctatccagttggtctttagggcactgaaggaaactcttcttcagaaataacyttttaacttttcttctgtcagctgcctgccaatcacggagccagaggctgaggggaggctttgagccggtctgcgagtccsgaaggcaaagatcgcgaagcttggcgctccagaacgctcagggggcaggtgacacagtcgtgggttccccggcgggcgctggcttgacagtttcctccccgcccactggcaggggagcgccccgccgggctgcacgcgcgcgcgcgcaggggggcataaaagccgcggccgcgcggagacgcggagctcgcccaccgcccgccccagcagtggctgcaccatgcacgtgaacggcaaagtggcgctggtgaccggcgcggctcagggcataggcagagcctttgcagaggcgctgctgcttaagggcgccaaggtaagcccggcgcccagccgcggaaatttctctgcccacacactccgagactcgccccgccgcccgaggtgcactggcggagacagggaggccgcgcccggcgtgcccactttgccacttccaaaatttgctgaagctgaggctgtgagcacacctcagaagtggctgggagggaacccaaacctaattgccaaatttcaggtccaggaggggagcctcttgtgtgtttattgtttgtccgtctatttmgtgagctgcgcaggcccgcgattcctctcctcttgtctataggtagcgctggtggattggaatcttgaagcaggtgtacagtgtaaagctgccctgsatgagcartttgaacctcagaagactctgttcatccagtgcgatgtggctgaccagcaacaactgagaggtaagacaggggaatcaatctgtcaactgggaacgtgctctcaacaagcaacaacctgaaggcagcccggccagggggccctgggtgccgcctccgctgcctcctcgagagcagctaccttgaagctccaaaagacagtttggactgatacgtttccttctgacagcccaatagctgtaaaaccgaaagaaaggcaagactgctggagaaatccttttattgtagtcatttggcagcattaatgtaatcaaaattcctttatgtattcaaagrcagtgctgctgcagtaattattaaatgattgaaattgcagacaaaacttggaaaattaaagtaggttaagtaaggtactgttgacaaacaacttctcccagaaagctggagtccaatgacaatcaaatgtggcagtgtttttcgtttaaacatatcagaatacaagttcaaggagcatcatcacagaagtgctagatgcttttgaccatatgttttctccggctttttccccaatgagacagtactttaaaataataataatagtaatcwtaataaagtatacaatgttagaattgtagtagaaacatctctatcagcctttcctcaatgytttcctgtttccggctactcacttaaaatagaccaatctacttgtgaagtatcagggacaatattggcatacacaataaacagctttgattataaagctgttttttttttttttgtacatctattggagaacttgagagtgccccaataaacttacaggaaacaaaaattctggagaaaaactagraaagtaaaatatttgtatttcacaaagttttattcaaagagactgagtaaattgtaaggcactttttaatcaaggggtctgaaaacttttgcaaatcttattccagygctcctgttcttaaagggacatcaaatgtacatttattttaaaattttaaaatattctgtaagagaatgaaaatgaactgacgtgttagaaggaagtggtgtaccaacagttaagagaaattgtaaaggaaattacataactgaaatctgaaaatgctaataaagacctataacacagatgacaagcatgagcagaacagatttgtaaacacaatgcaagaggaacatattgtaccagaggacaattatgttgattgcacatgatattttggatcaaggatagagccaggtcagatctcaacattcatgctgatggcataaggaacagtataaacaatctgaaagccatttctgtctcaatttatatagtttcataaatgacatttaactacaattgtttttttcccagtatttaaaattaataccttggctataaactcattccttaaggataaatgattgtggaggaggaaaaatactcagacacataagtgacccgggaaggcatgttggtcatgagaaatccacatgttgtctggacatgagcatttgcttgcatctaaaggaaacatgacattgattcttccagtttcaggatttaatgttgcctataacttttaaaattgtttagacagtgtggaaattataaaaatatgagatgaaaagtttcttggagataatctaaacataacttattttccaaatgaacaaatcacagccaagagagtttaggtaagttacaaagagtaccatagcatataaatgtcagcaagaggtagactgtctgttgcttgagcctggaattcaatgggatgtcagaaaacaagatggtatactatacattggtaagggcagagtataaggaatacggtggagaacagaatgaggaaagaaaattaaagcggcaattagacatacatatttaacaccctcattttccaaaaggtgaaggttgtttctgtggagttatgaagagttagaacatactcagaatggaaggagaaaaaaaaaatactgggggacattttctggacccaatttgagattttaagaaacatttttaagattccatgaaaaaaggccgggtgcagtggcttcacgcttgtaatcccagcagtttgggaggccgaggcgggcggatcacgaggtcaggagatcgagactttcactcgcgtctgtgtgaagagaccaccaaacaggctttgtgtgagcaacaaggctgtttatttcacctgggtgcaggctggctgagtcggaaaagagagtcagcaaagggaaataggggtggggctattttataagatttgggtaggtaaaggaaaaaggggggttgcccgctggtgggcagcagtgggggtcacaaggtgctcagtggtggagctttttgagccaggatgagccaggagatggaatttcacaaggtaatgtcatcagttaaggcaaggaccggccattttcacttcttttgtggtggaatgtcatcagttaaggcaggaacaggccatttaagtatcactacttttgtgattcttcagttacttcaggccatgtggatgtatatgtgcaggtcacaggggatataatggcttagcttgggctcagaggcctgacagagatcatcctggctaacacggtgaaaccccgtctctactaaaaatacaaaaaattagccgggcgtggtggtgggcgcctgtagtcccagctactctggaggctgaggcaggagaatggcgtgaacccgggaggtggagcttgcagtgagctgagatcaggccactgcactccagcctgggggacagaacgaggctccgactcaaaaaaaaaaaaatccatgaaaaataaacagtttgtgtttgttgttcttccattcccgtacagtgagtgtaaaaggtacatattaggaaatcttgaaaatgtttttagtaaacaactagcatagtaatttatctatatggcaactgattaatccatgtcttccccaatatgtctggtggttgttaatgattatatgaatttatttcaatcaaaataaagcttatgctgacctactttttttaaggacttgatatgttggtctggacacctgagaatatatttccgtcatgtagaaaaacaaccacaatttttatccatagtgtaaaataatagaagtagaatgaatgatcaaaggcccrgggaaacagtttaaatcaattagaactctgtcaaaggctgctttgagaaacaatagacatgtgattggacagtgtaatgaaagacattcaggcctcagaatccatgccaactttatcctgtttgaacatagttttatacaaactagtaatcctagtaatctgaagtagtaataatagtgagaaagaagaaggaaatagtaaacatcgaagtttcagtaatcaaataaaatcaactgaatgaaaagtagacttttactaagatataaaaactcccccaaacatgcataatagatctgaatacacaagaatatttgtattaacataacactttatgaatttaatatggcttatggaaaaggatgtttaccaatagtctaagctacagagcttcagtagcttctcagggactaagagacattgcttgctctaactgacttcaacgagctcttagcttaggatcttagctcagttctctaaaatgtaccccattaagttactgcttatagaacttcaatgtgcatacaaatcatgtaagaatatgttaaagttaagattcttattcagttagtctgtggtgtctgcaaaattctgcattcttaccaagctgccagattgatgcttctagtccacaaaccacacattgagaaacaaggaattaattacactcagcccatgagtttagtaactttcactatgagggtaaataaactgaaattcctctcatggcataggacatgatttaaatgtatacatggaaaataagaatgtatcactaatatcttgttttataattagacacttttagaaaagttgtagaccactttggaagactggacattttggtcaataatgctggagtgaataatgagaaaaactgggaaaaaactctgcaaattaatttggtgagttatcttagctatatttcttgtctataattatttaataacatgatgtttgtaaagaaaaaraggttcttggagtcatggaaacaaaacaatgacctacaatattgaaaaagggaagttacagaaagctggataaaagcattttcttttataaaaaggaagacatttaattatgaaagtaagtctatcttaaaatattagaaagaagcatgaataaaatataaatgattgcttaactcagggattggcagactatgacccacaggccaaaatagcctgccaactcttttggtatgacctgcaagctaaaaataccattttacatttctaaatggtggataaattcaaaagaagaataatatgattatatgaaattcaactttcagtgtccataaagttttattggaacacagccacagtcattcatttaagaattgtcattggctattttcatgctacaggggcaaagtttaatatttgtaaaagatcctgtggcattcaatgactaaaatatttacaatctggccctttacagaaaaagctcgtcaaccgctgacttatttatttaaaagtaaatcttaattaaatgctagaatgtaacagaaaacaaaattaaagtgacaatcgaactttgtaattagtaggactttttatcctgaaagttcgtggttcgtgtgtgtgtgtgatttccataatgtttgataatgacttagctcttaaaaatggtagaattaagaaataaaattttctcttttatccattaagtcatgagtttatgggttacctcattctataaatacccttgacataagatattggagtttagtaaaaatcaaacgttaactaaaactaaatgtcaaataggctgtgcctggggtctccctgaccttgctaaggtcattctcaccaatcttacaaggcaggtaattgtagagtacaatttggccactgtgtatgtataaaggtacagggagtgacctcctacttcatgatatcctcctagtagattataaactccataaaaacaagaactgggttgtgtttttctttgtctctctctcagtaatcaacataatatcttgaagatagtgcttagtcaatacattttttacttaaattgaaatgcccatgagtaattacctaactgctataataacttgatagaggcaatgaggatgacacttcttcacaaaagagccaaatctgtaagtcctaccttgagaagaatacagaattgctccctaaacttgacagataactaaaatacagttttcttttagttttttaaatttttcaattatttttgttggcttttcttttccaacttttattttaggttcagggtgtacatgtgcagatttgttacctgagtaaatcgtgtgtcactggggtttggtgtacagatgatttcatcacccagatagtggtcatagcaacccatagataggtttcccattctcacccttctcccacccttcatcctcaagtagaccttggkgactattkttcccctttgtatccatatgtgcttaatgttttgttcctgtttgtaagtgagaacatgaggtatttgattttctgttcctgcattaatttgcttaggataatgctctccagctgcatccatgttgctgcaaccaacatgatttcctttttttatgggtgtgtggtgtttcatgctgtatacctacccrtattctttatccagtcccccgttgatgggcatctaggttgattccgtctttgctattgtgaatagtgttgcgatgaccctattagtgctgtgtctttcttggtagaatgatttatgttcctttgggtatatacccagtaatggggttgctgggttgaatggtagttctgttttaagttcttcgagaaaagctccaaaatgctttccatggtgtctgactagtttactttcttaccagcagcatataagtgttcccttttctctacagcctcgccaagccaacatccattatttatttattttttacttyttaatgatagccattctgatcgctgtgaaattgtatttcattgtggttctgatttgcatttctctgatgattagtgatattgagcattttttaygtttgttggccatgtgtctgtcctcttctgagaagtattcacagaagtctctttatgtcctttgccctttttttaatggggttgtttggtttttgcttgttgatttgctcaagttccttatataatctgtatattagacctttgtcagatccatagtttgcaaatattttctccagttctgtaggttatctgcttactgctttgatagtttcttttgctgtgcagaagctctttagtttaattaggtccyatctgtctatttttggttttgttgcaattgcttttggagacttcatcatgagatctttgccatggcatgtcttcagaatggggtgytttgtgttttcttctagaatttgtatagttttaggttttacatatggtgtaaggaaggggtccagtttcaatcttctgcatatggctacctggttatcccagcacaatttattgaatagtgcatcctttccccatgctcgtttttgtcaattttgtcaaagatcagatgattgtaggtgtacagccttatttctggcttctccatgctgttccattggtctatatatctgtttttgtaccagtaccgtgctgtttgggttactgtagccttgtatagtttgaagtcgaatagtgtgatgcctccagctttgttcattttacttagaattgctttgactattctgactctttttggattccatatgaatttgaaaattgttttttttaattctgtggaaatgatgatggtagtttgataggaatagcattgaatctgtaaattgctttgagcagtatggccattttaacaatattgattcttcctatccatgaacatggaatgtgttttcatttaataatgacatctctgattcctttcagtagtgttttacaattctcattgtagagatctttcaccttgctggtgagctgtattcataggtattttattctttttgtggttgttgtaaatgggattgcattcttgatttgcctcttagcttggacattattggtgtttggaaacattactgatttttgtacattggttatgtatcctgaaacgtaacttaaattgtttatcagttctaggaaactttgggcagagactatggtgttttctatgtatagaatcataccgtttgcaaaaaaagatagtttgacttcctctcttcttatttagatgccctttattcctttctcttgccagattgctctggcttggatttccagtactatgttgaatatgagtggtgagagtgggtatccttgtcttgtttcagctctcaaggcgaatgcttccagctttttcccactcagtaagatgtttgctttatgttacttcgatgcctatgttgttgaggattttttaacrtgaaaagatgttgaattttacctaaaatcttttaattaagaaggaaggttctattttacagtatggataccctccttgcagttcttttaaaactttttctccagtgtacctctttcattatatttgaaaataacttgaaactgtcaagcttccctcaaaatctttttgggattctaattgcaaatatacatacatgtgtttggagagacctgatagctgattttcctgagttgagacagttctgtgatcttcttctactttagggtagaaatgtattgaaatgagatattctgtctgtgaawcatacttacatctcttggctaaatcttccattattatgatatatgaatgtttaatataccattgaatttttttaattcctaatttagtatttgtgcttctgtacttataaattgtactatccttaattttcttttcttataatgttcttatttggtttgggtgtcatctatatcctggcttccttttatgtccttgatctgttcatttctcaacagaggcattcttatctcaaatggcaaatggcagtctgcctacctcttttagtaattctgtaagtttagactctatatattataaatctataatattcagagcataagttgctaatgattgcaatttattgatttttaawttttttttaaagttaaacttctgatttgctgtctgatgattttttaatctattctatattttcagatataaaattagtaccctatcattttctttggattcacattcacctacctttttccattactttattttaaaaatataagcaacctttyatgttaaatttgttgttgctgatggtttattgtgagatcttagaatcstctaatctgtagttagacacaactgggaacatctgcctttttaatatttgtgagtttaagccatttatttttactcttccgttttatactttaatatttactgttttctttttgtttttattctttttctattccttccctaaatgcattatatagctttaattttcttatgctggtaaaaaaaaaaaatatgcattttatatttactctttggaggatacccctgacttattaagagttgtatttcattacatcttttggtagcctgataaaacaaaaaktttgaaaatatggctaattgggaactgcaaggatttttaagaatatagactcatgccactttccaaaaccacattaaatgacgagattttctttgaaccaggctatcccagtgaaaaagcacaaaytgcacaacagctttctctctttaacattactactgatatttgtaatagcttcatcggtaatatctacagatatttttacagataaaattaatagagtatatagttcctgtatttggtgacttcctaatggacacttgctgtgtcttttctctgaaaaatcagctgtcagaaacagtgtgcaatgattacagctaacgtaaagaaacatggaaatattgaggcaaatattacraagttacagaattcgactgatgtcttcatccagctgagagggcatgtttgctttaatgtagcctgtgtgaatacctgctctgagctgraaagtgccaatatcatgggcaaataggaaattctggaagaccaggggaattttattgtgatcctttagttataactaacaggcctagttccttctccattgaaatttatccagcctttatttttcttgggactctgctgacataggccacttttcagcttmacatcaggaactgatgatatatgtttacataaagaaaacaccatggaacctttgttaccaatgtattacttaaaaatatgttacttcccctcctacctaaacccgttgcaagagtagaatctgaccaataatttaacttccaacttgattatctctgttactgtaatgcaaatatttgtgtgtagtttatatractcttttttgaaactctgctctggatttaatttgcctccttgggtcttatacaattccatgtttgttcttttgcatgtttttctgtattactgctcatgtcagagagtaacctcttaaaagactttaccatatatctctccttcttctaaaatattatacaacatatttataccattttcatagggcttaccagttttttaattttattagaattatttaaatatatacataattcatgctattcatgctagtaaaccacaagttctttcaaggcagaaaactattgtcttgtgtccttacagatgttagttaatagttactgggtcacctgccattacctgtatatgatattttgcatacatgagagtattcacttctakgtctcagtacattgctttccaaatacattagttcttccaaacggtatcatctgtccttctacttttactccttatcaaatttactccttacttttcactttgctgatctcatccttcttcccactaaaccttttcccagtctttggtttccattaggctattttatacttcctccttagtctgaagccaacaacagcagcattatgtattgctgttcagaacacagaagaaatgttcagcaggccgggagcggtgactcacgcctgtaatcccagcactttgggagaccgaggcgggcggatcacaaggtcaggagattgagaccatcctggctaacacgatgaaaccccgtctctactaaaaatacaaaaatttagccgggcgtggtggcggacgcctgtagtcccagttattcaggaggctgaggcaggcgaatggcgtgaacccgggaggcggagcttgcagtgagccgagattgcgccactgcactccagcctgggcgacagagcgagactctgtctcaaaaacaaaataaaattaaaaaaaagaaatgttcaggaaagaatgagtctttgcaaaactatcaacactcatgctggcaattgggcagaggtaaacttaactttgaatattgattggaatggtaattctgtcatgtagttttgtaactttctgaagtttctgtaaacctaaatatgttcatccccactgatgtggaacttacagtctaattttgacatttaactaatatatgttgaattccttaacccatttatgccagaggttgcaatattttgaatttttgcatgagttaaaaattagaccttggcaatgaccttgaacagtaggatataaataactctcacgtgcttagtattccaataatggaacactaggcataagtgggtcaatatattcaaataagatttaaacaaaataaatgaatgttgctagtcattttttttttttttctgaaatgcacttattgactaaagatttgccctgggaaatacatttctttgggattagtcaaaattasaatccagtcttgactctataatttataaactgttattttatttctctcatattgagcttcccagggaggaaggtaaactccctatctctaaggactgttacgcttaaataaaccatagtttatgtgaatatccagcacagtgccactgcatagaatttattcaataaattacacttcccttccagagcatcaaaatctacattttctggccaggcacggtggctcaggcctgtaatcccagcactttgggaggctgaggtgggcggattagttgaggtcaggagttcgagaccagcctggccaacatggtgaaatatataatatatagacacacgtgcacatgcgtatataatctagaataaggactacgttgttatagtaaaggaggaaaagtgaaaaatgtcatttctacacagccaaagcattagaccctgtcttgtagattcatcctttgaactctttcatttgaaaaattacccagttcttaacctgataatggatgagaaaaataatcccttgcctttctccaccaaagacctaaagataaatattgcttttctaaaaaattaaaaataaatcttaaaaaatctcaaattttctatctggcttcatcttgttcatgtcgaaaacacaacwgtggggtgtcagcaaagctgtaatacctgagaataaaagcgtagtgccaatacgcatgaacagaaattctgttcagacatgctgaagccttctgcagaaactaacagaatccaactggcttcattaatttcagccatctacatctttttcttcttatataaacaattaatgttttggttttcctttctaaagaaaatcatgtggagattttattcattctccctaagcctacttactgtcaaattgacacatggcttaagtgaatagaacctccaatttccttttttgttcaagagctactgttaggtaggagaagtatatctgaatccttgcaaaaaaaagaaaacttcaaaaggaaatttttaagagaaaaagaaggtaagtacatgtgtaacctccgtttcagacgcattacctattgtatcgttttctttgcagtattgtaaagcatgaaaaaaataggaattaagatgtcaaaaaagaattttccttttttaaaagtctgagctggaagggataggaattcttaaatccaaaaggaaaagtaaggtttgaaatatcaatttgatcacacaggtttttttttttcttttttttttttggtagtgatttgaacaaaaacaggaaaagtgcctacacatggatataagtggcaaaacagtcaactatcaaaaggatagctgtaagcagtgattaataaaatttagttatagacattactaaagaccagatgtccagctaactgacaatcaccacttaaactggataaaacatttatgtgatttcacacaacacggagttgaggattgcttgatcttacaggtcaatgatatcatcgggcccagggttgtgtcatccctcccaccgaccattctttatgttggtttcatcttcaggatactaggaaataggggttgtccatttaagttacgacattcatataaagcaggcaatgtaaccatttcttcaggttttcttaagagcaacaaaaaatttctcagcagcatccatcctgttcccatctctagctgattgcctcccaggtctcactgaccaaaactgggtcacctgctggctctgaaaccagccactgtcaaggagaatgggatttccatgactgaattaaattaattaatcagtgtctacattaaatttggggagatcaccttcctcgtattatatggagaggaggtagatacaggagcaaaatagaacttttattagaaagaaaaaaggagaaaataaaacctctaggaaatcaagagtaagcattattctatattccaagatccaagagaattaaacagagtagttaagtgtggaatactgagacatgagaaccatatgcagagaagaagggtaaataaattttgcmtccaacatttagaaaacaaaaagaatatatggaattattgaagatgttgagaattgagtgaaagtaatagacatttttggaatacaacctgtagcataaaatctcatattgggcaactaagtgaagttttgcagatatatgacaagctccacaatgattaggcaaacccaaagaatccaggtttaatgactaactttaaaaacaaagctcttttaaaacctttcattgataatatttgcagaaatctccctaggtatctggaatagctataaaaactttggtgtgtgaaaatatgggaaaggataatgactgtattccttttctcacttatgcctctggattaggtttctgttatcagtggaacctatcttggtttggattacatgagtaagcaaaatggaggtgaaggcggcatcattatcaatatgtcatctttagcaggtaagggcaattattacattaaatgtaacattttcttantggtaatttggaccacaaaaacaaatcttcaaagcatatttattatcagctcaagttggaaattaaaaatctgatcgttttatagttccatggaattttctaktgcaaaatatcaaaagtttgaaaaatatgtttatttctcttaatttaacttgtggcttttaaagttatcttactgcagtaatatttgaaaaaatatatataatttttttttagagccaatatttttcaaaggttgtggtgagactcctaagcaataatgcatgtgaaagcacctttggcaaagtaaaaagcactaaagtgaagttaagatgtctctgctcccatgtgattttagtaacagtgtgtaattttaaaatatggcatatatcatagttaagatatgttaaactaataaataaagccaaacttacatgtagtataagcacattccttactcgtacatcagtctgaggcaagatccttgttgcaggtatctcttctgtatgcagacatttgaaaacctggctggcagaagttctgccgtcttcagcagggagctcccagggttactttagaactgctggattcctttttctctagcagaaagagaaraagaacatggaggaggcatggctactcttttaagaaccccagcccagtaatggcagaccttctgctcacatttcagtatagaacttgagctcatgtttcacctaactgtaagcgagtctgtctgggaaatgcagtctagctgtgtgcctaagagaagaatggatttcagagggcagctaatcatcttttccacagcatgcaatcctaaactatagtattttcagagtagtatgatttagtatcagctgatatcttatccttcaatactagccttaaacctctgactggactttttggagcaactgagtcaagtgactttactttttaaaactctaggaaaaaatcatcaatgattcttgaatagttcaagtgaaattgtgaagtttaagaagtctgatcaacatggacagcaaatctaagctatcttgtccaaaaaagtgagactttaaaaaattatctgtttggttttagttaatgtggtgatttcagaatagaaatttcagccccacaccccaccccaaccttggcatctcagctccagtgatttgggaagttgggtttggaggtacctgtgattgaacctctgtctgattctcagcatttgtctcatccctctaggaatgattatcaaatggttcttttatatcactgtaaagctgccaccagaggagatttagaaatctcctttagaagttctcaaaaatagactagcatctcattttctgggtcgcttaaagtcaaaatcatgtccctaaagctattacaaacctatttctataaatttttcagggtaatcagattctttttcctagtggtacaactacttataaattataacattttaatcctaatgatactttaaaaggtgagcgcacgggcaatatttgaaagggrtatgtgttccrgagagggccaaatgttaagctgtgggagactgaaaccctaaaagcaaattggcaaagctaaatctatactattttgaaataaaatcataagaaaaaaacaagtgactggagaattaaaaagagatatttagtattttcttaaaagtttaaatatttaaaaacctggggctgtgatcaagattgataattctctgtattctttcataaagctaagagggtcagcaaagcttggagtaccatgaatattctacaaggagcccctggcctttatgtcactggaggcactgatttcattctttggaaggctgaaagcctcagagttggatcaatttaggacgatctgggagaaattctttaccataagagggtgcttccttgccccaaagagcatgaataaagaaatgcaatgtagaattactgccttttatctgtttaaaatattcaaatatataatatcatttattgagcactgtttacctgatatcattttaaacactgtacattaactcatttaatcctcacaacaaccctgtgaggtaaactctatataatttccattttgaaaatgaggaaactaaggcaggagaagtgtgaaatatcttgcctaagcttatacatcaagtaagcctcagagctggaattcacatgcaaatagcctggtacaagtcttcttagaattttaaccactagattatttatctatctctaatatctatgcatttatttgttaatctacctgtatttatcccagcctaacagaaaagtaaaagcaactgaaatcgtttcaattgaataaacccttgcaatttgctagtctcttcaggcttcatgggcacagctctaatctcatggctgcattactaaaccttcagtgaaatcttaagcttttgccccatttgatacttccagtaaagtcctaaaaatatctggggagcttaccagtgtcacaagtcaaaacatgccattgagcagagcagtttaaggcttgcaatttgatgtccactttgctttgttggctaggagcttgctttgtcatcccgctcaccgccacctcccgccaaccccrggtgttaatcctctttttacctatgtcagatacaacatttgcaatcatgtgtgggcatttctctattcatgcagataaaacgatgacttgatataaattcagtgataagattgctttggttttaaattactttcctggcactggtacaatttaatgaataatattgcattacaaactgcttctccctctgattttcctccacrtgtacaaggcaacactatgtaaaatggttaaatagcttaagtttgtcattgttccctctgcttggcttactactctctccattttcagaagttgtccttggcaccctctcttcgtaattccagcctccgcacctcttgtgtttatactgtttcctcgttgccactggccaatgtggacagtctacttcctttcccatccagggctcccactaacatgccttcaactcacaaagtcttaaaatgaattgccttgtattttatccaccaacggagagcctccaattcttcccataatgaaattagtttgataaaaattcaggatattgtaataatgggagaaggcaaaagaggacccctccgtcttcatcattccctcagaaatggtatcaacaattttatgcccttgagtcatagcatgtaggaagaggtgagagcacaaaaataatctttaaggagttaacagagtacttctaatatttgcctactctgtgttttccaaaccttgcttcctcacagatttttttttcctgtttttctctgtactgcttactctattgaaggaatggctgtgggtaatattcagtattcaactcaacagggcctatcctcatgatctctagcgtggatacagtggagtccttcactgtcacagtaaaaccttaagttggcacactggtttgagtagagaagttaatgagtaatgaccactgacgcagacagagtatcaaatgcaattaataggtttaataaacaggagtagttaagtagacaatgattcctcagcagattatgggatgggtatgctctagtctggagttccacaagttgttctgagtgtggttaacccacatggacttttctacacgagtttttatttataaacataatatacaaacagacactaattttgccacatccatcctgaactattaaaacaaagttggaaggaacaatagaagaacgaagtctggtttaatgcagataatcaaacagctatgctccattaaaacatctcatgagtcaaatgcactccgtttgtttgtttgtttgtttgtttgtttgtttgttttgagacagagtttcactcgtgtcacccargctggagtgcaatggckcratctcggctcactacaaccaacacctctcaggttaaagcaattctcctgcctcagcctccccagtagctgggattacaggtgcacaccaccacgtctggctttttttttttttgtatttttagtagaaacgggatttcatcatgctagccaggctggtatcgaactcctgacctcaggtgatctgcctgcctcagcctcccgaagtgctgggattacaggcgcagttcttaagtatttaattgcttcagattgtgggaaaggaaaagttattgtcacaggaaaaggagcctacctaccaaccctgctacatattcagttagtgaggctgtggtgttcactagggacatgctctgtcactcagtagcattttgtgagagataccatgagggtcttatttactcagaagtcaaaacattggagtctccagaaaatatttaaaaatcatacaaaattttcagcatgtcttaagtaacaacccagtggcatatctgcttgtgctataagttttatctataataatataattagctcataatttgtgttaaggtagaagtgctaaaattactaccttaaataaaaatttcaacttaatcaaacatatgttgagcatttgcagaagggaaatggagatattaaagtaactaggcaaagtttctaccccaagagctgtatatcagtgtctcttatcaagatgacagaaccaaataatttccatgacataaactgtttaaacagaagcattggccaggtgtcatggctcacacctataatcacaatgctttgggaggccaaggcaggaggatcacttgaggccaggagttagagaccagcatgggcaacagaatgagacctcatctgtataaaaatttttaaaaattagctgggtgtgatggtgcacacctgtgttcctagctactcaggaggctgaggtgggaggatttcttcagcctaggagttcaaagctgcagtgagctatgattgcactactgcactccagcctgggcaatatagtgagaccttgtctctcaaaagaaaaaaaaaaaaaatcaaaaaacccagaagcatgatatttaagttgcaaggccttgggactccaatagccgaagaatggactagaatatccagaaattccaggtgaaataaaacattgatcatcttcttctatctctgggccaaaggtaagaaaatcgcatggcaccaccctctactactgctctcgtgataaggaagcaggcctaacacatattgagcaattgccaagctccaggcattgtggtaaactattggctttatgacatccacatctaacttttacaagtctctacaatagaggtcaatttaattatctccaatttatagttgaacaatgaatctcaaacagatcttgaagaatgtgggaattagcagtggtaataaaagcaattttattttgctccattttagcctgtgtcatagagtggatgtactgttcctatgctgtgattcataagtgctcagatgccaactgccatgagtatgggagccacccttcctgcttagtgctggcaaagttctcccaaatggactctgcagagtccattttgctctcttttggcttaaaatagtttaaaagacacatagtagaagtaatcagtaggaatgattaaatatttgtaaatgaggcattttgaaggatagatgagagattcgaggtttcttaacataggaatgagagggctactgagaaacgaatagtcttctagaacagtgcttctcagatttaatatgtctagggactttgtcagatgcagattctgatttcgataggacagagatggctcctgaaattgtgctcccaggtgataccgctccttgaaccacactttaagaagccagccactagtatgcatagggatggatattctttgaatgggtaagggagcttctgtcagtttcctctgaccacagcctaggcaatgactgaacactagtagcaactgtctgagtcactagaaattgctattaaacatatctttctgggaagatttttgttatagaatatatagtggttttatgaaagcatgtgtcactttttttttttttttttttgagacggagtctcgctctgtcgcccaggctggagtgcgktggcgcaatctcggctcactgcaagctccgcctywcgggttcacgccattctcctgcctcagcctcctgagtagctgagactacaggcgcccgccaccacgcctggctaattttttgtatttttagtagagacggggtttcaccgtgttagccaggatggtcaccatctcctgacctcgtgatccgcccacctcggcctcccaaagtgctgggattacaggcgtcagccaccgcgcccggccgcatgtgtcactttttaatgtcgtgtcacactctaaagcataacttaatggcacccataagaatgagaaaaaaaacagccatcagataaggtgttccattatgcggaaaatcacaaatgaggaagttcaccagttactttggtcaggtgtatgcacgaatcgtagataaatatttcttgctagttctcccttttttcttcaagttggagaagtggtggttaaaacagacagacgggtacacatttttttgttgttgttggttgtaaagaaaatgtgacagctttagattcctgcttttttagcgtagttacagaactccaggttatcatacgagtatcagcatccttagattcaccatttatttccctargttgaattttcagcatttttatatagtccattctacatggtttctctctccttaaaagcaaatcttgtttgcggatttagtatgactgcyctgtctgaggaggtttctgtttttgcaaaaaaatctttttgagcttttttaccttctgtgaaatgattaaaactggcttttgtaaatatgggtagaaagattatgaagaatagaagaactaatgtagagatggaatttacatttttttttctgaatgactttctttgttctattagtacacatgtaattttcagatattttaaatgctttcaggtattttaagtgctatatatattatttcgtcagtctaattgtttagtgttattatcctgagtggttttagaaaatatttctttgttttgtgggtagaatttctccctctactgatttttttttctgtaactttacagttrtgacagacataaatctgctactaattatacttggtatattttaaaaagagccattgtgtatttctataaataaacttgcacaatggtgggcctatcagaggtactgaaaaatactgttcttaactattttaatataaggtatctatttttaagcacacaggatttctcacaatgttaaacaaaatgccatttctttaaaagcagagactgctctcacatggtcacaatcctttgttttattgttgttgctattcttaaatcccttaatgttgtgacagaatatttccatgtgctccctaattttgagaattaatttgcaagattaaaaaaaacccatattagttatagtaactggtcctatagtcattatactggtatctggctcttcaaccggtaaaattccaccttcgtcctgcaacaggggtcctcccattggttttacacayttcaattgagtatatttaaaatattacttcattatactttgcatttaaaaggaactaaacacatagttcttatgtgaatttacttctgtagagcctgttgatttaagattagaaacagtccagtttgccaaggttcagaaatcaaaccaagttaggacactataccagatttgtggcattttagtgcaaaagatacattttcattaaaaagtacaatgtggatgaaccgataaataggtcaataaaataattatttgaggtttcatctggtttactcttgatgttgtacaatctgtaggcttgaacaaaggtataataacatatatctaccactataatatcaaacagagtggtttactaccctaaaaaccctgttctccacctgttcatcccttcctcccaccacctcctggtaaccactgatctttcaactgtctccatagttttgccttttccagatgtcatatagttggaatcatacagtatgtagccttttcaggttggcttctttcacttagtaatatgcatttacgtttcctccatatcttttcatggcttgatagccctttgttagagttgaatattattccattatctgaatataccacagtttatttgttcattcaactactaaaggacactaggttgcttccaagttttggcaattaataaagctgctataagcatccacacacagatttttgtgcaagcatgttttcagttctttgagtaaatgccaaggaactaaatgttggattgtattgcatgtttacttttgaaagaaattgctaaattgtcttccaaagtggctgtgccattttgcaytcgcaccagcaatgaattggagttcttgtttcttgacatattcatcagtatttggtgtcttcagcatttaaattttagccattctaatgtgtgtagtagaatctcattgttgttttaatttgaaatttcctataacatctgatatttatcatattttctttttygtttgttgtttgagacagagtctcactgtgttgcccaggctgagcacccactatagtttaaggagagaaaactgctaggaaatattacaagaagtaacccaaggctccctctctagagttcaaggcagagtaagaggtcttggcttgagataagtattttaaatttgaktgtgtgtgtgtgtgtgtgtcatacaaagattgagagagacaaattgagagaattaatttttatcctcaggagtgaataaaatcatgtagggaaagagtgttcatagaaaagcaaagaggaccaggtatatctctggagttttccagcatgtttatgggtctagtcaaggaagaggagccagccaaagacatgaagaagaagctgccagtgaatgtgagataggagaccagcctggaggaggaaatgtttcaaggaaagcatggctgtgctagttgctgctgaggaagggatcaaggaaaatgagacagagatttagccttagcaaaccattgctcattggcagcctccataagatctgtttgactggagtgatcagatgaaagcctgatgggaatgagttgtagagcaaataggaggtcaagaaagtggagacaatgcaaggcatataataactcttctgaggactttccattgaaaagagaaacaaggtggtagctggagaaaaaataagtattatttttagatgggtaataactgagatatgtttatatctcagagtgattctgtttctgcagttgatatcagtgaccattttaagtctcttaaartactttcatccgtaatttctgttacacaacacttaattgcttctcttcctacctgggctggtttattctgtccttttgctcagtcacctactctccaagagatgactaccatgtatagttgtgcaggttgtaaatggtaggaacataagcggcacagtttacaccaactaccttgtaaattgtgtctccagagtcataccgtgcacacttagtctaactctatgagctgacccttattaccagccccagaacacaatttttatttgaagcacatggaaacaaattctatgttggtgttgtgggcctacagtaagtagtggaagcgtggttaaccaatcctgaagctacaccacagtagcaataatactatacctacagaagaaaaatgaatcagatgcagtagaaaatgttggattcctaaaaaatgtccacccccaactaaaatcattgtcaaaaataataaaacaacaagagcttttctccctccatttaggcttcattttcaaagcaacaaactgaagtataggtagtaaatttctacattgagagtcagtttgcaagttggagagaaagcactgcaaatccaccctgcctgttcaaaacataagaagcaccagttaaaatctacctatattagggaaaaaaagaaaaaaaaacttcaattaacaacttgactaaatgaaacaattgaaaaaaatagaatgttccttacacattacaacatggatgaatctcaaaacagctatcctgagtgaaaagtcagacaacaatataatttatactatatgattacattatataaattttagaaaatgcaaagtatagtaacacaaagcagatcagtggttgcctgtggggaggagaggggcagcagaaagggattaccaaggggcacaaggaaacttttagggtgatggacatgttcattatcttgactggtcatggtttcattggtatatacatatgtcaaaacttatcaaactgtatactttcaatacgtgcagttttattgtatgtcaattagatctccatgaagctgtaaaaaaaaaatgaaaaaaggaaacttggtttctgaatgtctgaaattgatttgtgtaggttttcatctaatactaaaaagtgaggggccagtgctgtggctcaggcctgtaatcccagcactttgggaggccaaggcaggtgcattgcttgagctcagtagttcaagatcagctaggcaacatggtgaaatcctatctctaccaaacatacaaaaattagctgggcgtggtggctaatgcctgcagtcccagctactcaggaggctgagatgggaggattgcttgagccaagtaggtcaaggcttcagtaagccatggtcctgccactgcactccagcctgggcaatagagctagactctgtctcaaaagagagagaagggggcagaaaggaagggagggaaggtatggggcggggggaagagagagagagagagaaagagagagagagaaagtgaggccggccatggtggctcatgcctgtaatcccagcactttgggaggccaaggcaggtggatcatgaggtcaggaaatcaagaccatcctggccaacatggtgaaaccccatctctactaaaaatacaaaaattagctgggcaccgtggcgcatacctgtagttccagctacttgggaggctgaggcaggagaatcccttgaatccaggaggcagaagttgaagtgaacagagatcaggccactgcactccagtctgttgatagagcgagactctgtctccaaaaaaaaaaaaaaaaaaaaaaaaaaagaaagaaaaagaaagaaaagaaagtgaaagcaatgcaagggtaaacattttgcagaatagcagtgaaaatgtgattagaatgttacaagattcataaaaccaactgccatttaaaaactgcaagcaatttctttcacattccagttgcatttacgaatccacctttaaggaaagtatgtatgttgtctttgcttattaccagaacccacaaagcagtatatttctttcgcctctatgacaccttgaactagctggggttccaaagttcatcatctctgcatatgtaacaaaaattcatttcaaattcatctttgacaactcttatgaacaatgtctttgtagttcttgcggctgtgtgaactagtttatctctgattaaggttcatgctgcatttcctgctatatatgaacattgtcctgaaaccactgcctttgtctcataaacatttaaggaatgggtaaagcagggactaacaagaaccagaagcagcaactcctggttatacttttttattccctttatcttccactcctagtatacctatgtagcctgtggaaacatcataaattcttgttgactgacactgacaaacttaattaacttacacattttacttaacaacaacaatgacaacaagagaagcaacatattaacaatactttgaaatcattgggtggacacactaggtgtgatctaccatcctcagggatttaaactgcccttgtgcaaacatactttataaattgaaacctggcaggcacccagggagtggttatggtctgcatttattgctgaactttggcccaacaccctcaaatgattggtggcattctgggaatagttagctgggtggagatgagcatgtctcagcagaataatttggtattattagcatgacatttgatattaaatatagtataataatcagggatcactgttacttgactcagagaagtcacaaacttaaaaagcattaaaacaagttaatccaaattagtcaaaaacaaatacaagaatgactctggttcaatttgattgctgattagataattaacaattttgagaaataagcttgataataatagttactagagtaaaataggtttttattgttgttgttttgtgtcttttcggagagctgagctaggctggagttgggggagaagagatgctataggtatatgctwtactgttttttctctccagaccatgaatttaatcagttactgttgtgcatatgtggaaaattacaaaataaaacattctgtaattgattgaatttcatagttgactacataattatgaaaggaaataaaataggaccacaaatgtttatttctatcttcctaagtcataggacaaaaagatctaggcatctacaatagatcaaataaaaagaagaagttaacttttaattttcttaaacttttggaggcattgttcaagacagattggtgacaggaaattgcatactaatttgtagtgaagactaataatstccaagactctctgaagattcaaattccttcagccattaggaagctttaaaaatgtagaatatatactttttaaaatccagacttaaaaatggaaacttaggtggtaatttactgactttaaagatgattttctttgtgttttagataccatttactttccttgactttccagaaggcctggggaggcagaaaaacacatataactcttggctgtatctctgtgtaacttagctactataaattctggacgacaygggtcatggagcaaataaactacacttaggctactgagtttcacaaagctatctggttttatgttactgtgttattcagattcatcttaaattgaaattatcacaaaatattcatttgcattttcattactgggtatagtctacttattttttcatcaaagcatttaaatgttatatttgtctgtttcaggactcatgcccgttgcacagcagccggtttattgtgcttcaaagcatggcatagttggattcacacgctcagcagcggtgaggctacaacaaccgtcatatctcattttctctttgtacacatttataaaacatgaattctgtagagargaatcacttgagaaatcacttggatgaaaggtggaaaaatgacatacctccatctcaattataaaaagttatcagatcacataaagaaccaaataaataatagatcatttttaaatgaagtggattctaaatacagatgtgttatttaaaaaaaatgtattaaggataagtaatggggagatagtacttatttccaaaaatgaccccaaatggaaatattattaacttcagcttttctgaaatgcaagatgcaataggccccagccattatttgtcaccagagatacgatgaaaakgagtgagaacatggagctggaaggaggggtggggccaggcatttacttgatagagtggtcaaggataatgtctccatggaggcctagggtgaaaggtgcacagaccttagaaaaatactttagacctaattgatcacatgcattgacagcatgaggtgagaatgcctgcctttttataactcacaaaagagacgcttgaaaggggcctggcaagcaaagggaatgtagtttgaggtatgactcaagacaccagcacaggagctagaccaaaagcagctatgggccactgttgtgagcttggattttatttcaagggcaaccatccatggggcttttacaygcaggagtgataagatcagatttcctttttaagaagaccattctgtctgcttttgcaaattgtgttacaaaagacaagtgtaaaagcggaaagaacagttgtagggggtctctgggtggttcatctaggtgagacaaagagagcagctagagagatgaagagaaaaatattagtaatcaaagaattagtaggagacagaaaaaacagatgcacaaatgttaactgttcagtcaaaatggaagataagtagttctcacactcttaaattgattggaaattattgcttaatttgcaaagacataatcttcagacagacttcttataaacacataaagctctcttacaaagcaaagtaaacctgaaagaccagaaattttatatttaaaattacaagactggaaacttctacagtcaattctcagtatgcatggtggttatgttccatgaagtcacttacaaacactacattagtgactactgaaccattgcttttaggggaaatagagggttaagttcctgaaagcctctggtcacaaaactccaatcaaycagtcaatacataaccttattttatgtgtattcctgtttaaagaaccttatttatcataggttgtatgaacattgaactcattactaaagcacttattactcatgcctgatcaaaatttatctaacacaaatattttctgtacaggacatcagtcttcttacactaaggaacactacacagcacttctgcagtgggtttggcagccattttaaacagcagaatcaccaataaaaaagcacaaaattagaaaaacatggcacgacagagtatagtcttacttgacctcagcaggaacatgcacatcggtgactcaaatttctcactgccctgtgcatgtccacaaataactacaaatgctccacaagtattgatttccagggttacaagtaaattttagcaagcaaatttaacaaatttgtttatatgtaatccatgaataatgagaattgactaattttttaataattgcaaataaaatcaatagtttgtaaattaagccaaataatgttagtctgaaaatacttaaattgtcttccagataggacagattattaagagtgtctttagaatcaaagttctaaacattttcactaaaagtctttttaattaagtattatttgttatacaaccaccatatttgaaataacacttgggatatcgattctaagtctcagctacttagcttcaggctcctgcagagttcagtagataagagaagcttacataattgtttccaggagttgtccagtaatactgatttttwaaaaaaattaattaggtgagaytttcaggaattaatacaatactttatgtatgtgttattttactatctatttaccagtcattgttacatagctgggaggatatctaattagtattttttacatcagaaaattgtaagatgctttaatgatcagtttgtcctgtgctatatgtttatgaaactgctgaaacctacaaccttctaattggcagttggctgctaatcttatgaacagtggtgtgagactgaatgccatttgtccaggctttgttaacacagccatccttgaatcaattgaaaaagaagaaaacatgggacaatatatagaatataaggatcatatcaaggatatgattaaatactatggaattttggagtaagtaaaactatgtctattttsttttaaatgatgaagcaaagcattatttagayaagctataaaargggaagaaataagcttatacagttgagaaatgaacacaagcttcaaacttttggtttggcaaactctctgggagaaaatatatttttctgggtttataaatagaatgtaagtttatacattatgaatgttactttgaaatatgtaaaatgcttcattactaccatcagtcataaagttgatatttagtcacctttgaaggcaatgataccttctctgcctaaattccaagcaatattcaaatatagtctgtgaaatattgcaagtttccatgacttcaaccacttttataagaaatagttgatacacacacatacatggacacatactttctcagtgaattatgtctgaattcaagcaactgaggatttcatgaatcatagttatcatgttgaaggaatcagacctgagatcaaatcttggctctaccactaaccatgaacttacccatcatacctctagatgcttcaattttctcacatataaaatagagataatacaacagacttagggactttgaaaaacttaaataaaatgatacatacaaggtacttaaaatggtaactggtaaaaaataaaattttcagtaaaygctagctgttaccaatcatatttctacactaataacatctatatctggtaagtctaagatctactgatacgataaagatgagaaaatgatcatttgctcagtgaaaataatgagtataaattcctcctgccaaaatgatggaaggttacagctaaatttatcaaataatttagttaatatccaattgaaagaaatctaattgaataaattagataaataagatatctaatctagatatctaatatggaattaaataaaaattggaagtagcaatagtttaatgacacacatttccctataacatgttcaacttaatagattcttcagaaaataacttaaaatgaagtggtaatatgcctcattctttcgtttcaaaatactgttttctttatttttagcccaccattgattgccaatggattgataacactcattgaagatgatgctttaaatggtgctattatgaagatcacaacttctaagggaattcattttcaagactatgatacaactccatttcaagcaaaaacccaatgaacagcttatgtgttagccatagctgaaaataagcacaaatagcttatattcagatcctatcttcatttgaatatagcttttaaatgaaatgttacagtttgaagttttccttcatgcacttggtgataaacrttttctaaatttttagttaagtatatggataaaaagttatgaactattaaaaatgtgatgtggaccaaaggctaggttgtaatcttgatagtctaaaaaatgatcaaaacaaatgattttcaaggaatattcaatattctgcctttcagaaagtgtatttatatctgtgcttcataaatattaatgttcttcagaacatcattttaaaggagatacttgaattgttatttaaatcaaaccagatgtaaaacactcacatacaagttcatactttaaaagaggaaakctacttaacaatgacaaatatttcacaataataatttttacttatataccatctttcaactgaacatttcagttcttccaagagcttcttagagtagtatattttgggggcagtcaaggaataaactacagtgtaaacatatcccagatgaaaactgctgtatggaaaaatgacagaaagtaactgattgacactgttgattcacagttcarcctcctatctgggaaagacatttctttcctctgctcactttaagaacttttaccgactccaaaaatctcaggaattaaacttttaacagttacagcaataaagaatagttagtactccaaaaatattatatttaagatgctcaacaagaaaaaaatgcaaatgtaatatttttttcaaattacttctttattgacttgtccaaatttcaaaagtgcctacccttcaataaaacttttttattctgatctccataaattacttagtcttctatgtatagctatcaaggaaataaaaccaattttgccacagccacaactgtaaatgtttttgtacccatgctgaaactcataacaacacagacataaaaatagctgtgaggttttgctttttttgttgtcagctatcttaagaatcattaaatacacctgctttgggtaaaactctttgcaagcagtaattaacactagtaacagtgaaagcacaagatttccaaatcagtcgttttctcaaaaaaatatcgtataagtgactcatcctgtctgctaactccagacctcccagcttgaagccaaatctttccatgtgagattgatatggatttcctagaagtactggaatgttgtcatatcttgccctattttaattctgctatagaaaacaattgccttcacttttaaggagtaatttgaatattaataactctggtctagattttcatataatgtattaaagacaaagtagtgaacatcaatgaacatctgatagagataaactgtaatcaggcataagcttgtttgtatgttctggcagtgactaatcagtaaatgatgtcggtttgcccagtatcacttatcttctgtatttttcctctgtcgtgtaaatagtataaccttttcatttatggacaattttttggactagtagccttcaatatacattctgctttgaattaattttttcaaatcaataaattatgtagacatttaaaatcaaatatcaagtagaattgaaaaatgtgagttacataagttaaaaacttactttaaatcttaccttctataggtagctctaaataaattcatatggttatatgryatctctggtgtatactgattgagaaaataattaaactgaagttaggggagggggaccttggtttcttgtatttttcagtgaatatcctaatgtaaatggtatatatatttttccaatgtgtttttcttagtaaaatgaagttggtacttctcagaacagcaacactagaaatacgtagacattgagaaaaagatcaagacttgataatgcattgaaatgtcctacaaattttattttctcatgtaaaaatgaatttagacacttgtaatatcatttaacattcaagtgattatatgacaatttctccttacttttgctctctataaatttagcatactgaagagatctgagaatgcaaattttgaaaaaaattcaaggtatttcacatactaaacatcatcagatggtttttcttaaattagaatttcaaaagggaaatttactggtgcataggaaaaggtgattggatccagggtcacagttgctgccataaggtctccatctccttttctcttgttagcgtcccttctaggcagctctttcacatgatcacttcccggatctacaggcctgattcccagcagcttgcagtccaccaaaacaagaactgatttggccttgcctaggttatatgcccactactgagacagtccttgtggtcagagagatagctactctgcctgcccagaaggagatggcatgcctccccagagctggcagaattatggggtgggagggagacaggagaggtgggcagggcattgacatgagtcctatggactaaaacaaggagaaggaaaatttccaaaaggaaaattatgctgtcattaccagaaagtaggtgaatgcatgctgaggtgacagaaacaatagccactgtatgtagagaaagacagagtgataaaagatgagttatgtcttaatcctttggataagtttgcatactatcttggttcctataacatgcctagatccatgttttcaaagtgtgtgaaaaactgaatcactctggataggatatgataaaagaggagacaatgaatggaaaatacaggaggcatctcatgcatatatgattgtactcattcttgatataaaatatatttctcattgtgaaacacagtgaaaaaggttcaaaagctacttgatttaatattgactgcaaaactgcaatcattgcctctagacttgctttgtttttgagattctgaatatatgaccaccttaattctaccattacattcaagcttattagcctcccttccttctttctttccttttcttttctttctttcctcctttctttccttttcttttctttctttcctttctctctttcatttctgtctttcatttcccttcattccttccttcccttccttccttccctccctccctccctccctccctcccttccttccttctttccttctttttttctgagacaaagtctcactttgtcactcaggctggagtgcagtggcatgatgcggctcactgcagtctcaacttcctgagctcaagtgatcctctggccgcagcctcccaagtagctaggatcacaggcatgcgccaccatgcctggctagtttttgtgtatttttaaaaatcctcctgccttggtattagtaccatttctaattcttcttactaaaatctcattgtcagcatataattactttcatgcgcgtccgtgtgaagagaccaccaaacaggctttgtgtgagcaacatggctgtttatttcacctcggtgcaggtgggctgaatccgaaaagagagtcagcgaagggagataggggtggggccgttttataggatttgggaaggtaatggaaaattacagtcaaagggggttgttctctggtgggcaggggtggatctcacaaagtacattctcaagggtggggagaattacaaagaaccttcttaagggtgggggagattacgaagtacattgatcagttagggtggggcaggaacaaatcacaatggtggaatgtcatcagttaaggctggttttacttcttttgtggatcttcagttacttcaggccatctggatgtatacgtgcaagtcacaggggatgcgatggcctggcctgggctcagaggcctgacaattacattaaattttacaagatttctaaggttatctttgaactatgaaactcttttccccacagttttcaagtaatatttccacacataacattcactcattcaacaaataacaattggctggctgcggtggcttctgcctgtaatcccagtgctttgggaggctgaggcaagtggatcacttgaggcaagaagttcgagaccagtctgcccaacatggtgaaaccttgtctctactaaaaaacaaacaaacaaacacatacggaaattagctgcatgtggtggcaggtgcctgtaatcccagcttttcaggaggctgaggcaggagaattgcttcaacccgggaggtggaggctgcagggagccgaaatcacaccactgcactccaccctgggtaacaaagcaagattgtctcaaaacaaacaacaaaacaaacacaaataattattgagaaattgtgttgttggtaaatttatatatacatgtttaagtatattatattctatgtagatgttagggcagacatgtatcagttattaggtccaatatggaaaacagcatttgagtcctgaagaaatgtaatatggggaactattaatagttacaaagatcctggaagagctaaagagccaaacatgggtaatgaggcaacccagcaacagcaggaaggctctatcacttcaagaactggtgcaattcagggtactaccagtgccaaggaaccaatgggaggctgccaatcaaagctggggctacagagcaggggctgtcaggtgggaggtggaattctggaggagacagccactgtcagagatgccaccccaagagagtggagggggaggaaataccctgaaatctccccctgcaatatcctattaagtatctctcagccaggaagggagttacgaaaaacgtcattttcagggccagccctttgtgttacacagcagagcagcacaagggaaggctgtggatttgagaacaaacaggcagatgacatacattttacatttttccctgctacaataaggatttcgacttgccacttactcccttctaaagcttgttttagttttcgttttcttttgttttcagagggagttttactcttgttgaccaggctggagtgcaatggtgtgatcttggcctttgtgatcactgtaacctccgcctccgcctcctgggttcaagcgattctcctgcctcagcctgccaagtagctgggataacaggcacccaccatcacacctggctaatttttttgtatttttagtagagatggggtttcactatgttggccaggctggtcttgaactcctgacctcaggtgatccacccaccttggcctcccaaagtgctgggattacaggcatgagccacggtgcctagcctaaagcttgtttttaagaatcgtgagtaaagatatcactctaactccatagttattcaatggtgtgatgtttctggggtctattcccacagtagctaatggtcatgtagtcatttgcatgtaactagcctatgcattttgctttccagatgtatggatttattactaattcctatcactaatccttaaaatcatttgtcttactaccgtgacttaagtatgtgttaaaaaaaacactgtctcattctcacttacaagtgctatgaaggaaacaaggctactaaaacatgttgggccgggcgcagtgtctcacgcctgtaatcccagcactttgggaggccgaggcaggaagatcacttgagatcaggagtttgaggccagcctggccaacatagtgaaaccccatctctaccaaaaaatacagaaaaattagccggtcatggtggtgcgtgactgtagtcccagctacctggaggctgaagtgggaggatctcttgaacgtgggaggcagaggctgcagtgagctgagatcacgccactgcacaccagcctgagtgacagagtgagaccctgtctcaaaaataaataaacgaataaataaataaaacatgttgactgtcttgttagatcctactacatttttaagctcaatctgctagatttaaatcgaaagaggataaactggtaaattcctgcatttaggttgccctaatttcatgctaatgatataccattatttaaaatttaatgtatacatttacataaatttttatttgcccctaaattcgtgtgtggtgtgtgtgtgtgtgtagaactgaactagatcaatggctttcaaatgttttgctcctatacccacaaagtaatttttataactatgtattctttgtaatcattgagtaagagtagcagagaattcagataaacccctgaaattcatggcttaacacaatagtttttttttcctttacacacacaagaatgtagtgctgtattcagtgagcagcttttcatgaggttgttcaggatccttctaccttgtagctcccctgtctatagctttcgaatcatttacttccagccagtgaactgaagaagaaagaatggggcaggcatacctgcttcttgaacatttcagcctggaagtaacatgcattatttttactcgtagtcctctggtgagactagtcccatggccctatctaaatgcaagggatactgggaaatgtagaaactgtgggtgatgcctcccagaaacaactctacacactacagggaggctgagtttttgattgacaaatcatttgtctttgccacacttaatatccctataaatcccttgctcctcacactgaatacattttactcctactcaacggtaacatcccaaaatcctatgtagttactatcctcaatttagatttagaatcaccaacacatgcacagtcctccctgtcasgatgcacgtggcttctcatgatctagtgacctatgaacttaaaaggcaatctctcttatctgctatgtgtgtccacacacacaaacacggacactctaatgatgagcgagaagagaaaaactgcaataaaatacctcatttggaaaagaaaagaatgggatacataccagtctgtggtcaatagcaatgagacagtcctaccttgtaggcattatgaggtctctcttccgtggcagtggggaatttccttgctgatattgaaatcttcagtttgggattcgtgattttaccatggtgcccaggagcctctctctctaacttagtgaattttttctttgtctcttaccctccatcttttggtgccaaatcttctgggaagttgtggagtttacacatactgtgtcctatcattgcaagttgctttgaaacccaaggcttaagtcttaaacagttaaaagctttttttattattattattttgagacggagtcacattccgtagcccaggatggagtgcaatggcgcgatttctgatccctgcaacctctgcctcccaggctcaagctattctcctgcctcagcctcccaagttgctgggattacaggcacgcaccaccaggcccagctaatttttgtattatttatttatttatttatttatttatttatttatttatttattttttgagacggagtctcgctctgcgcccaggctggagtgcagtggcgcgatctcggctcactgcaagctccgccttccgggctcacaccattctcctgcctcagcctcccgagtaggtgggactacaggcgcccgccaccacgccgggctaattttcttttatttttagtagagacggggtttcaccgtgttagccaggatggtcttcatctcctgaccttgtgatccgcccgcctcggcctcccaaagtgctgggattacaggcgtgagccaccgcaccgggcctagttaaaagcttttaaattctgacttgggatttcttcagctctgcatcgtattaaaaaattagtaggctctgatctgtttacttctagtgaatttcatttgctttaaaacactgaaatatttttaaagtcacaagtcattaatagtcataattttcaagcctgatattttattttgcaccctacccactcgttattcctctcttctttcaacgtaatgggagtacactgagaaaagca

SEQ ID NO: 95836 - DNA, 23711 bp, Homo sapiens
  misc_feature (1)...(23711): n = A,T,C or G
gggtgcaatgtatcctgtttgggtgatgggtacactaaaagcccagacgtcaccgttactcaatatatacatataacacaactacacttataccccgtatctataaaaataaaaaattaaataaaatttttttaaatcttcagagaacatgttatagaggtccttagcggttttctggggtactgacaatattctgtttgtttatataagtggtgattacatagctgttcattttctacaaaattatttaatctatttatttacattttatgtcctttactgtatttacattgcacaatgaaggtttttaaaaagcataaattttaatgatatgcagaggtcaaagagatattaaataaaaaagcaggttctacaacagtgtgtataataccaagatttttcaccaaacagatacatatcaaaatgttaagaggctggtgattttcaacaagagctagagtatttcagagatatttgaaggacacaaaagtgtttctaaaaaatgaaaaaaataagctatgttatgtgaaaatctttcctttcatatttttatatgaatgattgagaattaacagactatttgtgtagctacacacaggatacatgtgttcattatttggatagttttctaatactcattgtcatgatcgacaagtagatatcattttaaatgcataatgtacttcctgtaagtcactgttagtttagaagtttgcttttattgttgaatttctttattgaaatcatctgtcacactaccttaacaatgtcaaagtcattttttaagtggtaggaagacatcctgacatctactctgttgccctaaggctttactattgtaatggatcacatttatgatgacatcataatgttataaacaactgtcacaaaaagcaagatccaccatgtttaatagtctactatgtccttgttatgaaaactatatcacagcagtggcccagtattacaattacacattgaaaatatgttgtacataatttattttgataagaaataacttaataggcccacattctactgcacaatcttggtctttataagtcactaagatkacttttaaaggttaaaaagtcaaaaaagtttgtgattagaatctgctattgatttgacaaatggttttgggggcatgacccagaaaaattatttcagaagagaagaatgctctcttttctcatttagagaataagaggatgacacttatttctgtataatgactctaattacatccagaatgtacaatcaggtagtaacatcaaatgttcccagattaatgtagacattgatttaaattagaaacacagtaccacaatgctctaacatcagcaaaaatcattacttacagtttatgaaactgacaggagcaaatgccaatcaagtaaatagcctatatttagataacctaggtaatagttcagtggggagttttgaaaaagaaattatcatttcaatgccaagtcaggcttacagctttgaacaagtagcaaaacatggacatgtttctcaaatggatttcacagcatcagtgcaaaagccggaggggatggcttagttttttaagcctcagaattgaaatacctagactccctgcaactacagcattaaatcctctgtggaaccacagcttcaaatgctatcaggagggactcaactcttcatccttctgagactgataaattgaaagccatgaagtttagaggaaataagagagcctgcagcggtctgaaactcctccacccacctccaacacacacacatacacaaacacacacacacaaaggctctatttgcaacatcacttaagattccatttgaggctttccccttgttaagacttaagggtgttgtttttaagacatccagaaatctcacagtcctgccatgcaccatctttataagcattcaaaccaaatttcaggcagctccaagtaaactaaaaacattatttttaattctcatttaatatattcaaggaaattctaagtgattactttcaaatgcattataggtattgggccaactctttattcttcctgtggaaatttctgtgtctcaaattgatcaaattgatttctttttactgccttgtatgtttctggactgcctccttgacatcaattataggtacttgggaatggcaaattagaataagagaattttatttaatttgcctggtattacaccattctcccacatctcctacctcattcacaaagctttgtaaaataagaaagaatactattattatctccattttatagatgagaaaagcatggcttaggaagcttacatgagttaaccacagctgatacacagtcacctttttttaattttttttttaatagagacaggaatctcgctatgttgcccaggctggtctcaaactcttgggctcaagccatccacccacctcagcctcccaaagtgccaggattatggacatgagccactaggcctggccacaccctaagttttaaaatctaagtctggaaaatcctcctgaagtattgctagttataagtaagctctacttaggaacagaaacattttgccaaacaaaattgtgtaatgcattctaaatttaaataaaaatacttttacaaatagttcctttgatttatcagtaacactaaatatctctgccctgtgtataatgatttaaaagaatgaaaaattggagaggatgctggaaaaactgaggatcatttattttacggtctactactgaaacaggaaaagttcccttgtcgcccttgcagggcgtgtgatgggggtgtggctcgcttcttcagtgtcctgctgctcaaacctctataggggcatacagacgggcagattgtgaggctctgaccccacagcagtgtctaggtgtgaatgtttacagctgaagccccagtgggcatgtgttacagggtgctcttttagtttaaccgtctgtaggcggcttgtgttagctcaattagacccctgccttatcgcaaagacagagggctttctgtatcccgggttcttaccttggtgtacgggaagaattggatcacacgtgggcttgaagaatgagtggaaagttttattgagtggaagtagctctcggcagacgggggaaccagaagggagacggttttctcctggagtcaggtatggcggcctgactcttctctgacctcccgcgacaaactctgcattcttccgctggtcaatggcctgccagcatgccggtgtgctcctatgctggtgcgttcctttcgacatccagcagcccctgtattctctgcctatatgctcctctcaatgtccagctgcttgtgcgtctgcctgccagggtctcgggggtttttaaaggcacaggatgagggcatggcaggccagggtggtcttgggaaatgcaacatccgggcaggaaaacaaaaatgcctgtcttcacctaggtaggcccaggcccagggatgaagccctagctggggaccacgccctcctctacccagcacttcccgccccccttccttatcatttaaagggaccacgcccttcccttcccagcattcccttcccagcactttcctgcggcatcactacctgttaacaggtgttccttttcgtttagatttacctcaaaacaacggcgaaggatctaattatatttaggcccaaaagagcacctaagtgagagtaacagaaggttacttctagaactaaaatgaaaattattcttcaagtgttagtcaaaggaaaactactccagaaggaaccaaatatccagacgaatttaacttaagaaacagctacaatttaggcaaactggacagtggatccagtaggtattttagtagccactaagaagacactgaatcgggtagattctatagggattgcatattagttatttaaatacaaatatccggctgggcacggtggctcacacctgtaatcccagcattttgggaggtcgggggggtgggggcggtgggtggatcacctgtgtcaggagttcaagaccaacctggccaaaatggcaaaacctgtctctacttaaaatacaaaaattagccgggcatggtagtaggcagtagcaatcccagctactcaggaggctggggcaagagaatcgcttgaatgcaggaggtggaggttgcagtgagctgagattacaccagtgaactccagcctgggcgatagagcaagactccatctcaaaaaataaatacatacatacatacatacaaatatccatggaaaagttgatatattgagaccttctatcagccattcccactatagtgtaatttagctgtttctctgacaggaatttttatttaagaagaaagaatttggagaaatagacatagtaggaggtaacagatcaggctctttccaccagaagaaacacaaataccttaaaaaacaggaagaggctagagagatcagtggggtactaagaccaattttccatgtattgtattttacaatttttgctaaaggcatgtcctaattccttaaggctgcataaaaatactcagcccaggagctaaggaaaatttactcagaggacaatgtatgtttttctggctttcttaccctgtttcacccaagtttccagtttcacctgccattgggttatgattactccagcacagatgacttgttcctcttccaaaccccatgaaaggaacttagaaaatttgtctttattatatcttttaattaacacttccccaacgggataatgatacttctgggctatcttatgttctttaaattatgtatttaatttcctagcaatcaataagagccttgaaggttttgtaagtctcacaactcctacctagtttatatttttacatttatttatttatttatttttgagacagaatctcactctgttgtccaggctggagtgaagtggtgcgatctcggctcaccacaatctccacctcccggcttcaagcaattctgcctcagcctcccaagtagttgggactacaggcatgcaccaccacgcccggctaatttttgtatttttagtagagacgggtttcactatgttggccaggctggtctcgaactcctgacctcgtgatccacccacctcagcatcccaaagtgttgggattacaggcgtgagccatcgtgcccagcctagttcatatttttaaagtttgtatagatttatagatgcttttaaaaattatgtgattatgtgtcttgccttggcaacctgggcaggcattccagacacccaaagggattattagttcatgttcgcacgtctgcccagcaacaaaactgagcagcctccaccaagcacgtaaaatccccattcctcctcttattcatttatttagcacttaatagtgccaggcaggaaggtaaaaatacatttaaaaaggaatggaggtagccgtcttgccctggaggtgcaggaagctgcacttcagtgtgctaggtagagggtacataggccgtttctgtttttcttccagctcagggatttataatgagaggaagtgctacaaaaagctgyggtgcgaaaatgacggacgctatgaatggaaaaaaaatctaaaatcaatccggtcctaagcaaacacgcttcacctacactcataactattgcagacctccgaggcctgggatccccaagaatatactgagtttgacaaacttttcaacttcaactttaaattaaaaagacagtaaaagaaccaaatccatagtacacagcaatcggctaaagttcctggggccctgcaacccagagttgaataattttgtattaaattcccaatatcaagctaaatctattttaaccacaggaaaagcagcaacttgtctggctattttaaaaatctgaacagcacttaggaagaagcaccttagcgcagggaacagctcagtgccccgtgacacaactctcccgcgggcccagggacgcctcgtctcgcgagagttgagggacgcctgagcgaacccccgagagagcgggcgtgggcgccaggcgggcggggcactggggattaattgttcggcgatcgctggctgccgggacttttctcgcgctggtctcttcggtggtcagggatggcgcggaagtcgaacttgccygtgcttctcktgccgtttctgctctgccaggccctagygcgctgctccagccctctgcccctggtcgtcaacacttggccctttaagaatgcaaccgaagcaggtgcgggttggcggcctgggcgggyggctgcgccgcgagagcttgcgggtggggatgactagcccgccccgctgcagtcacccggcagggcggacggaagagcgccgggctgggccgggcctcgcggtcccgccctctaggtcttcccgagtctccagcgccgctcagtctcttgcaagtggcctttactgcatcctccccacctaccgctgttgcattttaggtcctcccttcatgcagcccccagcgcaatgtattttccaccctgctgctgaccatagttatggcctttgtgctttaatcaagtagcagctacgcttttctgcctgacagtcttttcacgggctgtgtacgtctccacctctcgtttctaatccttcacttctttgcaattttgtagacgactaatagtgtcccagccatagcctactcttttcccatttactttttttgccacgtgttgtcatactttacctgccacttagaattcaaggttccaacctttgctgtacattcacactatctggggagcttctcaaaaatcatcctgccggggcccacctcctgtgactgtgatctaactgctggaatcagggccactgtttttctttaaaaagctccctaggtgatttcgatttgcagacagggttgagaaccactaagctaaggtatcacctcttccaggaagcgttccctgacttaactgccctcgtgtccagaatgagttaggttcctgccttctacaccttgttaatagcctttacgtaccattatcttggcattttcgcattgtactatgcttgtttctttcatttgcttaatgaccagaagagtcattttcagacccctcctcctccatctgaggttgctaacgtattaactttctagggcagaattggctccagaatttggtggcagtgcatacgattcagagaaaatgaagaagcaggctgtgagaaagatattcccagccataatgagacgaaaagaaattgcatcagcctgggcgggggacagttctgtgtttaagttgcctgtattgaaagagggaacttgcgtaaatacactttcaagcctgtaggtgctgtagtgatgcttgaagtgtttaccaaccagagcacccactcttcaaggaattctgttgttaccagaaaagaaattgtccatcaaagacccttccccccacacccccaaatgtatgggatcctggctctgctacttaccagctgtgtgaccttaaactaactgcctgacctgtggctctgtttacttttctttaaaatgagggtcgtsattgtacagtacctaccacagaagctgttatgaagactcaatgaactaatccatatgaagtccacgttgtaattgtttgctgttcagtattattaagacttcctgggataggtgttacctcaatacacatatcarttatgcatattttaatctaatgatgcagaagaaatgtgtgaagaaggctgcggtttagtggattttttatttaactgccttttagtggtttcgattgtaccttttaaaataaaggaggggatactgatttcgtttctcgcacacagaagagatagatattagtaagtgaaaaaaaaaaaaaccttcagcttgcaccaatagccagttttttgagttcttctgataactagttaaataattttgactcttcactgactcctttgtaacacttgataaactaatgtgttaaaaaatcagcttaactcagtaaatgtgaaaaagttgttaaattggagttggtttgttgcatttggcattgaaaaaaatatatatatataaacaagcattattgggatttgattaacagcgtggagggcattagcatctggaggctctgccctggatgcagtggagagcgrctgtgccatgtgwgagagagagcagtgtgacggcyctgtaggctttggaggaagtcctgatgaacttggagaaaccacactagatgccatgatcatggatgggtaagaacaccgktcaggtcctatttattatgttgagttacatttagagttgtggtcttctgagagcaagatgaaagaatgcatgagttttgacacagatcaaaacccctagcttattatacttgacctttctaaacacagtttccctctcaactgaaaaaaaaaaatcagagtaatagaaatatcacatggagagataggtagtcccttagaactgggagaatgccaagctaaaaaactatgtctctgaccttataaacaatcrtttatctgctgtccacaaatgctgtggtttgcctgacctgaagccttcaggcccctttcaaaagccatatttaaaattagcttggagaaactgagaattttagtgctgttktggtacatggcaagttgattttctatttttttccttaattttgtctgattgtgggaatctatatgaacttcgtggatgtgctgtcacttctgtgttaagatggtggagtttaaccgcaaaacactattgattggagaaaagcaatgtttttaatctatgaacctctgaaaactccttaattcctaactgcattctattttcttgcagcactactatggatgtagragyagtaggagatctcagacgaattaaaaatgctattggtgtggcacggaaagtactggaacatacaacacacacacttttagtaggagagtcaggtatttttttaactacactgaaattttttctagtcttttgactatagttttcactgaaaaatagtacaaaatcatggataaaaccagatctaagttcaaattccagctgttttacttaacatctattgaactggataagtaacttttaaatctctttacttcttcatctctaagaagaargcaatggaagttttgagacggagtttcgctcttgtcacccaggctggagtgcaatggcgcgatctcagctccctacaacctctgcctcctgggttcaagtgattctcctacctcagccttccaagtagctgggattacaggcacgtgccaccatgcccagctaatttttatatttttagtagagacggggtttcaccatgttggccaggatggtctcaatctcttgacttcgtgatccacccgcctcagcctcccaaagtgctgggattacaggtgtgagccacygcgcctggccgggacgagaactcttataatgcatgccccaaaggttttaagtggatctgttttaggaarggcataaggaaatcgaaggtctaaaaattgagtctcttaaaactgttcatgtgtgaatattcctttgaaagtctttgtgtagctcacttaagatgctgctgacccagaatgtctctagtacatatatttttgttgaaaagacaatacttgaataatttatactttccttttttccaatctccagccaccacatytgctcaaagtatggggtttatcaatgaagacttatctaccastgcttctcaagctcttcattcagattggcttgctcggaattsccagccaaattattrgagggtatgcacacatttaatttaaaaaaataagttaattgaaaatattcagtgacatcctttctgctcagtgttgcctgcctgttgtccagggtactggttagcatcctggctgtacattagaactagtggttttagttgactctccaggtatggatgttcctgaaacacctctagctgcatygggtgcatatccagcatggagagctactggtctctcacartagttttcaaactgaagtttctgccatgtggaggtggctgcctcaatcagggctgctctgcttgtatttctttctaactaagtctaaaaaatcagtttggaaactatgagtctaaaatatttcttagattttacgtgcagtgtatccagtatcttgttcttgacttgaggacatgtaatattacatgtctagtatgttaccagtggaataatttttctttaatgagacttttggcataaatcagtttgcctttgccgtacagggtccttctgtgggatatcttagtctctcatctatttcttccctaagtcctaattactttcgagtagccatcaagtcagaagtcccttgggttagcacttgaaagaggctaatcataaaacgaagttaggggaggcacctagcgcactgatgtgtaagacatgaggaataggaataggtttcttgctttaataccagtctacatacacaacctaaatttatgagtttgcattatattcttgagccctttagatttataaaggaatcttaaagcacaacttagaatataktcacataaacctagctttgaagaaacaataaaagcttttaaaacatattttactttaagtctcagaattctttggccaaggaacaaatttctgaaatttaaaggtccagtgtgtatctaatttctttaaggattaatatctaattttaaaaaattttactattgtgttgagaattttagatatatataaagagagaaattagggacctgtgtcatgcaatatagatacctcacctgtattatttaattcttagactagaatrgatattcagtaaaattatttatcttatttgtttttatataagacttagtgatttcttagcttttaattcttatctttaagttaccagatgtctttttttggtttcttgctagtgtttagcgattgtacataatttcttggcaatttctaaaaataccctttgtaagaaataaaacttaaatcttgtttacagaatgttataccagatccctcaaaatactgcggaccctacaaaccacctggtatcttaaagcaggatattcctatccataaagaaacagaagatgatcgtggtcatgacactattggtaatttgccttytgtgcagtttttatggataaagtttagttaattatcttcctgtagctcttccctattcttctaccagaagttgattttgattgttttaactgccaattaagtgtgcctctctatagatagatccatcttgtcttaggatctgtataaaatttggcaaattatttatacaagacacctaaaacccaatgactattcacttgcggatttttaaatctttatttgacatttcattttttggcagttttatgttgctgtattttagtgaccttaaataactttttccaagttacaatgttgaaaatttacattagtctatgtcttagtttgtttttcgctgttataacagactaccacagactgggtaatttataaacaaaagtttatttgcctcacagttctggagcctgagaagttcaagaacagggcactggcatctggcaagggccatcccaaggtggaagtcaagagaatgagacaggaaatcgggtagaactcatcctttatatcaggaacccactccctgcgataatggcattaagcccttttagcctaatcgcctcttaaaggccccacctgttaataataattaataatgttaattgcctgttatagtggcagttaacaaaatacccagactggatggcttataaacaacagaaatttatttctcacagttacggaggctgggaagttcaaggtcaaggcgctggcaggttcagagtttggagacagcttgttttcctggctcatggatggcgtcttcttgctgtgtcgtcacgtggtggaaggggcgaggaagctctctggggcctcatttataagggatgaattccattcatgggggctctgtcctcatgacctaatgagctcccaaaggcctcacctcttgataccatcaccttgtggaataggatgttgacatgaatttgggggaacacaaacattcagagcacagcagttattaccagttgctcaattatttggttatatttgaggtaaactttatacacctacagtgattttttttttttaacttctaggcatggttgtaatccataagacaggacatattgctgctggtacatctacaaatgrtataaaattcaaaatacatgggttagtgtttccaaaagaacagagctctcaaatatacactgaatgcagagcaatatatgccgggtgctatgggggttgcaaagcacagccctagtctcacagctgcgatgaatgagtgtgaaagaaaatgcagtactctctgctgagtgccacaggagagggagtcacagccagtgctatagggtttaggggtggcagaggtgatctctttaagctggggtagttaggaacaccagtaaagtgatgcttggagctcagccctgagtcatggtagttgaggttcagcgctcctactggctaggaaagttgtgtgtgtatatgtgtgtgtgtgttcagggctcccactggggtgtgtgtatgtgtgcatgtgttcagaactcccactggcttggaaagaaggggkgtgtgtgtgtgtgygygcgtgcacgcagaactactggcttggaaagaaggggtgtgtgtgtgtatgtgtgcgtgtgcgtgcacgctcagggcycccactggtgtgggtgtgtgtgtgtgtattcagggctcccactggctagggaagaaggggtgtgggggtgtgtgtgtattttggggtaggggaagtggtattggaagataagactacaagggaagactggggccagatttaaggagtcttaagtcagttgaaggcattctggatttaattttgaaatagaaaagcattaaacatttcttactagaaaaaaatctggtaaaagtttggcacattacataggaagcggaaatagattatagatgagggaaaccaattttgaacatgttgcaatcatctggaaattagatgataaaggatggtaataatagaatagtcactgtaaatctgtgccatcctggtatatacctggctgataacaagttcttttaaaaaattaattttaatgacaatgaaaattatgtgtatttgtggtgtacaacatgatactttgatatatgtrtatgttgtagaatggctaaatcaagctatttaacttattatctcacagacctattttattatggtgagaacacttaaaatctacttagcagttttcagctgggtgcagtggctcacgcctgtaatcccagctctttgggaggccaaggcaggcagatcacctgaggtcaggagttcgagaccagcctggccaacatggtgaaacccagtctctactgaaaaaaaaaaaaatacaaaaaattagctgagcttggtggttcgtgtctgtagtcccagctactcaggaggctgaggcagggagaatcgcttgaacccaggaggcggaggttgcagtgagccaagatcaatgccattgcactccagctgggtgacagagcaagactcctgtctcaaaaaaaaaaaaatctacttcgcagttttcaaatgtgcactctattgttattaaccttagtcagcatgatccgcagtaggcctctggaacttaccctcctgcctaactggaattgtgtgtcctttgacccgcatctcgccaggtccccctccccccagcctccagtaaccaccattttagtctctgtttctatgagttcagctgttgtacactccacgtctgataacaaattcttacataattaatgcaggtttgtgaaaaccttagttaaaaaactaatgaagacctgttctgtctttgttccgatgaagaatttacttaaaacggtatcagaggctaagtggaactatcccttatttggaacagcttatgacttaatgtgttttacactcgatttcctgccctaaattgttaataccctctcaaagccgtgtaggagactcaccaatacctggagctggagcctatgctgacgatactgcasrggcagccgcagccactgggaatggtgatatattgatgcgcttcctgccaaggtatgacttcttagtttgtgaattttagagacctttggagaagatatttttttcttttaagatagaaaataatttttgaggctgggtgcagtggctcacgactgtaatcctagcattttgggagactgaggcaggtggatcacctgaggtcaggagtttgagaccagcctggccaacatggtctcgaactcctgaccgtttctactaaaaatacaaaaaatttagctgggcatggtggcacaagtctatagtcccagctactcgggaggctgtggtaggagaatcgcttgaacctgggagacagaggttgcagtgaaccaagatcgcgccactgcactccagtgtgggcaacaagaatgagactgtgtctcaagaaaataaaagaaagaaaacataatttttgtattgtgtaacctgaatttctgtgcacaagagcttcttagaaactgcatacaaacttgttgcctatcattttgataatgataatcattcaagttaagtaatcatagtcctgtgaaataaagtagtatttctcaccctgcttcccagatgagaatacttatgatctatttagtaattgatgtaaagctactgagtaaaggagctgtgataattgatggtaaaagtaggaagtgcagtcatcgtgtacytttaaccaccctagctagatgttgtgcccatgcacactactttcccctttgattgtagctgtttttctcattgaaaatctgtattctttttgagttctggccattacatttgactgtcggtatcattactgacagttattcagccaaagccaaaaataatattccacatctgaaattcatgggtggattagttgaaaagatagacwctgtatcaaagtngacttgctttgtggatgctttaacagaagtaaccgactcttgttcatttatgtgtattctatcacatgtggcaattttggtggttttaatttctaacttcaagtaacccaatytggagttagtatttattctgagacactaaggtttcacctctgtttcaatcagctaccaagctgtagaatacatgagaagaggagaagatccaaccatagcttgccaaaaagtgatttcaagaatccagaarcattttccagaattctytggggctgttatatgtgccaatgtgactggaagttacggtaagttgtgtttggattttgtatttgtgtgaacttccaaatatttctaaaacatacactttttaaatattgttttgtacaatacactatattcaatagaaaaagagactccttaagtgggcattgagtaaatgttcattgatgatctcaagacccacagcgttaaaaatatacctaaaagcctctttggattgactgctggtagttatgacccagtctctgactagtagttcttatctttcacatgtgtcttaaatgaagtttagcttcagctccagtacacgttgacataggctaatctagtcaaatgtttatactaattaaaaatagacaaggataaattatcttccctatttcttttctattcattatttaaatgcctcagccatttagatcttctcggggctccaaagaacaaaatgtattactaattagtaaaccgaagaggttagcagaattatttttgcactgtttgaggcttgtctttcacttcatttactttccatatgagcctatcacagtttcaaagcattttaagrtcagccactgctgattctcattagtgaattttcagatggggaagatacacagcttactgatcaatatgacttattaggttggactgcttattattgttctttgatcttttacttcccacagttctatatttgaaaaacttgtttgaggaatgctttattcttttttaagcactaagacacaaaagtcaataaaaattatgaaggggaaaagctttatgtatcaaataaggcagttctattgattccctcttaagaaataaaccttattagaaagctcaaagttggatttaacagaatgaaaaaaatgataattatataattgtggatgaatttacaggtgactagtttcttctatktaatgaccaaagaggaccctcccccaggtgtttgagcatgagaagatgaacttgattagacaaagcatcttgacaaattactcttgactcttcctgtgagagtagaagaatagggagcaatggtggggtatggggttatgaatgaatgatgagaatgttctagtggctagagaaataaaatgtgggagatgtgcctgaatagttttttctaagaaaaacacgtaagaacagttaaataatcgtagcagtgacagcatgtgtatagatcaacaacaacaacaaaaaccagccagttttctgaagttcaaagagatagtttaccagctacctcattcctttcatggactgttcactgctcagttctgaggaggatgacactagtgtatttccatgtggcttagacataaggtatacagtagccagtgtstagtcaaataagcagtatctgtattggttataaatatgtgcatcctatagttcaccaaacttctttctcatttttggccccaggtgctgcttgcaataaactttcaacatttactcagtttagtttcatggtttataattcckaaaaaaatcagccaactgaggaaaaagtggactgcatctaatccatctytactgtcaacatctgtatttaaagaagaaagaaacaaaggctgaaaaggctgctcactctcatcatctagtgttcctcatgtgttctaaagtctttttgtaaaataaacacaaaaataaatttatgttgaattggcactttctatatctgaaattgtattatctatttttatttmacctttcttatattatctgaagatgaatatgtatgtsgctgtattttgtatatatttaagttttaagtgacacttggatttctgatcagtgttgcaaaaaattgctactttgagatttatttccacagtgatrtattaaacccaaaaggaatcatcatatttggatgcttaaaatagagtatacaagttttttagacccaaagaaaaaaacagcagagtctcagcatgatcagtcctgattgaatttcattatgtcacagtgatgcatgtcttrgcactgattattggttttacttaatattccctaaaaacttgaggaaggaagatgatagaacatgagatactctttgttttgtacatactagaaaatacagctatcttctgatgagcaattgtgttgattttctttgcttttttcctcttatggagctctcagtgtgtgaaagttctaaagccacaagaatcaatgatgttttagctgctaatatttagtattgatcgtttcttttaaaaatgatttggggaacttgatctgtactgtaattttactaattccttgtgcagaggtgggtatggcaattagaagtcaagaaatgggttgtttagcttggtttgtttccctaacttctgattaactctctgtatgacaactctacagaagttgtgcgcgtgctttctcagcagcatttttccttcaamatcatctttttaatcaacagtcattaataaatgtacatgtacgatattcaaactttagaatttcagctgttttttctatgctcatcttatgttctttctaatttaggggagaaagctatcattttaagaacagtgtaagtcacttgttctgggaccttgctgtgtatcagaattgtttggggagcctctttctttaaaaatgccctctgtcccactaagtcagattctccataagtgaggacttgaaacctggaattagcaactactaatggcagccctacagcttcacactctcagagaaggaatcttcctccagggttatctgaggtatgctaacctgcttaaacctggtgctgggccttggaaaaagaaaaaaatcagatttaaacttgcggttacattaagatgatacttttgtatatttgctttccattaataaataaggcagtcatttacaaaatcaccaggaaaaggagaatgaagtattcatggcctgtcacttcccagcaaattgggagttgagctgacaaaagcaatccacatatgtttctaaaagatgttttctttttaagtcgcattcttcctcagagaaataatttccctatatttcttaagtaatggaattactttgtaaatacattcgtaaaattcagttttgactgtaatattatttaaataatatagatgtgtcttcttttgaaaagaattgtttgtgtgtccctagtgatgttgtatacggagggaacttctttgatgatgtgataccagtgttcacgggggttgtgggaaatacatgtaggaaactggtgaaatattaataacacagctgggaaagagaactgtgagccaatcagaaatacattgaatttggaagcggttcactaaaatgggaaaagcaagaaagtaacttgggaagggagccttagaaaatgtaatcatggtttaactttttttttttttttttttttgttttgagacggagtctcactctgtcgcccaggctggagtgcagtggtgcgatctcggctcaccgcaagccccgcctcatgggttcacaccattctcctgcctcagcctcccgtgtagctgggactacaggcacccgccaccacacccggctaatttttgtatttttagtagagatggggtttcaccatgttggtcaggctggcctcaaactccagaccttgtgatccacctgcctcggcctcccaaagtgctgggattacgggcgtgagccaccgcagctggacttgatttaactttttatgccagacagtagttaatggtttgcctcacatctgtcctggttgtatcattgtatagattgcatggctattacatagcataaggtaagggatctagttgcagaattttcttccccattctggcaagttgctttttgttgttgttgttgttttcctttgatcttataaaaaaatgttctatcacttgcctactgctaaggtgaaattagattgtcctaagcacatatatggattaagcaacttttctaagtgattctgagaacgaacatattgtcacttagatttttattatcagcttttgtattctctttctctctaaatggataaaaatttcagtgacaatatatatcaagtgacaatatctatagatacatgtagatatatataaagagaaaagtatatatgtatatgtatacatatataataagtatgtatatggaaagaggtataagtacttgccacctgattctattctctcctgttttctgcttacacctttcatctcataacattactattacagaatagcctaggagtgtagtgggcagtagtttgagcattcttttagctcaatttaacacccccacttagaaaaagaaactgatttttgatattagcaatattaaaatttcttgattaatactcctgagacttcagataaacatcactcaagtgctttgtgtttttagcacaataggcaaagaggaaaatgttaaccacggtatgtagtaaagattttggtagtttcatgctctttatttgctttgatcaatccctggaacttaaaaaaattatttcactgatttaaatgggcaacaaagactaattgtaggttgattcttatttctgctagccacagtgtaaactggttgtcatgaatcctgttcaccaaacatttccagctcttcctacctggcacatggtaggattgttcttttttgcctcttgtgatctggtccagccatgtgacgttccggtcatgagttttgagcattttttttcaaacctgacaacatgatggtggttgtccttgagggaccgtaatgaagagaaccccaggacagtgcaggatgcacgtgtagtgtgaacaagaaataagcccttttttttaaatttattattattatttttttgagacagagtctccctctgttgcccagaatggaatgcagtggtgcaatctcagctcactgcaagctccacctcctgggttcacaccattctcccgcctcagcctcccaagtagctgggactacaggtgcccaccaccacacctggctgatttttttgtattttcagtagagacggggtttcatgtgttagccaggacggtcttgatctcctgacctcatgatccgcccgcctcggcctcccaaagtgctgggattacaggcatgagctactgcgcccggccaaaataagcctttctgttgtgacacagcataaactaccctatcctgactgatacgtagagcatggttaggccaggcacaggggctcttgcctataatcccagcactttgggaggccgagacaggaggatcacttgagcccaggggtttgagaccagcctgggcaataacataattttgtagagacctggtctctacaaaaaatacacaaaattaactggatgtggtggctcatgcctgtagtttcagccaccgcagaagctgaggtggtgagattacttgagcctgggaggttgaagctgcagtgagctgagatcgtgccactccgctccagcctggatgacaaagtgagaccatctcaaaaaaaaagaaagaaagaatttaaagagtttttgtggaggttattaaactggtgacaaatgaaactctctaaaggacaaaaggaatttaaaaaaaatagatgcctagaaaggtatcattaggaaattaatcaaaaagttaaaggtactactttgtaggaaggttgtgggtgactttatcttaataatatttgtacgtttttaaaaaagaagcatccataccataagattccaactgtatgacaccagacagggaaaaactatgaagacagtataaagatcagaggctkccagcagttgtggggagggaggaatgaatcagcaaagcacagactacttttagggcagtgaaactgttctctataatactgcaaatggtggatgtcattttatcatttctccaaacccayagaatatgcaacactgagtgaaccctgtcgtgaactatggactctgggtaataatgatgtatcaatgtcaggtgtaccagctgtaacatgtacaactctgctggggaatgtgggtggtgtggaagaaagactgtgtatgtgtgagggcagggaatatcagggaaatctttgtaccttcctcccaattttgctgtgaacttaaaactgctctaaaaaataaagtctatttaaaaggaaaaaaagaagcatatattatttttatgatggaggcgggaaactcaagtattaaagttctttcatctgagtatgtgctgttgtataagagtagccagcattgattgaacacctaacaatagtaagcactttgatgtattatcatttaattctaccaaaagccagtgaggaaggtaatagcatcctgggtttagataattttatacatagtagctgcaattccttcaggcatgcatggtgctggcttttgttcaggactatcttttcaagaatgtttctatagcaaaaaacccttggaagattgagattccaaggggtttccctcctgggcaaggggcatgtttgttgctgtctagtacaataaaaataatgtctcccttggaggcaaaggttaggcaggtttgcttgcaacccttataaaagactggggtttcctaagcatgaggtccctcagctgagatgcacgcaaacttaacgtttgcagtatccacctgaacctgccccctctgtacccccactgggaccctagtagggatcagaacatcaaagtcctgttgtttactgtgctgtgactaataatgtcatttgtctctgacccacgtgtctcatgctttctgcctgttttcatgaagctatggcaagctaacttgttagctggcaagtagggtgaaacctctgacccttcacaattcttgatactgtcaacagtgcttagtaaaagagccttattttgttattatttgctttcccttgcaatacgtatttgagattaaaaaaaattgtacacttgcaggtaaatcgaagataagatcaaagactgcagttttgcaagttcgaaacctaaagaatgacttaacaaaagccaaggacaaccttctgagattgttttataaatagttcatataatgaacattgaattaattgcgataaagttttcaaaggaacacttattctattcaggaataccatctaaaacatctaaatgttaatctctttcctttgaagaaaataatcagatagtaactaacataattcaaatgtaaacaggctgcgtttaaaatgatgaatattctcatctttcaaaatagaaaatcaggagacactgtccgtaggaaataaaacaagaaacaaaggtgtaaatggttataggtattcaagaaaggatctctctcactacagtgatttaactgcaatggggagtgtgaggaaaatcctcgttatctacactcaattaatcaaaaaaaagaggtataagtaccacttcccttttagaatacggaggttatcaccaggagaagtcaatagtgatttcttatagggagtggaggtggaggtataagaagatcaccgataattccataagcctttctctactagaatttttaaaaaatcatacctacctattattttcataatatatcaaggttgattaaagctaactataaatgtgaaaccgtaaatggttcataggatcagaatttagaactagaatacacctttgagatcagctacagaaatctaactcctgtattttataggtaagctgacacttaaaagtgcctcataactcaggaggcgacatgactagttagtgtcaagaacatatcatttctctctgcctgtgatcatgcttatcctaccaagggtgctaccctaccaagggtgcacacactacagttaattctgtccttcaagagtctggtgtttcatttcttttcttcggcaacagcagtaaatcataaggttctcaaattctaagtcagatataatactcagataatctccagtatagtcatagaattatgcataaatgcagatcatacataaattataaacccaagtttctatattcttaaacaaaatgtgttcaacactctatgttcttactaacttactaggtttcctaacatttaatttgtatgcagaattatagaaatggtgaataaattaattgaattcataattctgatattctgagccacaaaggatccaatccatatttttaatggcagctgtagaacttaagtccatttaatatggactgttacttatagagtaactttttttaattttttaattttttttgagatggaattttgctctttttgcccaggctggagtgcaatggcgcaatctaggctcactgcaacctctgcctcccaggttcaagcgattctcctgcctcagcctccaagtagctgggattacaggtgagtgccaccacgtctggctaattttgtatttttagtagagaaagggtttcaccatgttcgccaggctggtctcaaactcctgacctcaggtgatccgcccgccttgacctcccaaagtgctaggattacaggcgtaagctactgcgcccagcctagagtaa

SEQ ID NO: 95837 - DNA, 81980 bp, Homo sapiens
tttgagcacctggatcaagctgttctaaatttggagtctattccctataagtcccttttttataagcataaaatagtgagttggatttttaaccctcggccgtctaaagaatgcttataatcgtgcggtgtacagggaaggcagattctggaaaagacattgtgttaagtttgacaaattctcagatattgaagttatagttcatgggcatgtagaaaaagtggtggtcactaggtgctggtgtgtgttcagtaacacaagccatgccaaagtggatgcatttctgtgaaaagagcactagagtgtggatttggagcctgttacggacaatgtctctgaatcttcctctttttttttgagatggagtctcgccctgtcacctaggctggagtgcagtggtgcgatctcggctcactgcaacctctgcctcccggattcaagcgattctcctgccccagcctccccagtagctgggattataggcgcgcgccatcatgcctggctaatttttgtatttttagtagagacggggtttcaccatgttggtcaggctggtctcgaactcttgacctcatgctctgcctgccttggcctcccacagtgctgggattacaggcgtgaaccactgcgcccagccattttttttttttttgagacgtagtctcactctgtcgcccaggttggggtgcagtgtcacaatcttggctcactgcaacctccacctcctgggttcaagccattctccctgcctctgcctcttgagtagctgggattacaggcacctgccaccatgcctgcctaatttttgtatttttagtagagatggggtttcaccatgttggccaggctggttttgaactcctgacctcaggtgatccacccgccgtggcctcccaatgtgctgggattacaggcataagccaccacgcctggccagtcctctcattaacttcttatggacaaagtagagaaaggcgggtggtagactaatgtctgcctaatcatcttaagtgactttatatgacaacttaaataatgcaggcaattctcatcattctactcaacaagtatgtgccccagaataagagatgacagatgtgacttggttgaacggccttagttctcattggtgtctcagtgaaagcatctgactgtgccagttctgattttggtacataaatggatgttttcatataacatgacccttagatcaagctgactacatcaggcactcaaccaaaagaaaaatgatctgtttcaacactgtgtaataaagtattatagaagataaggaggcagggagtgccttataagattttcactttactgattttggacactgtagtcaagttgatttttataatagttgaacaattaaatacatttgattggttattttcaatctggaatgagtgtctagaagttctactggatagagacatagaagtcatgcttatcaaatttgtatgtaacctgaagctgggacatatagctaaagtatttgaaaatgaagatctcaaaagactagaacagaccctaaacatgggtctagagcatgagaacattcaagtatacacagaagttcagtgcctgggttaaaaactatcaacagtgcaagtgcacaatgagatataccgactgtagtttatatagaaaggactctcttttgagttgactgttagcacaaatctacagtgtgcagcggaaaagatccagcacaaaggtgggcatgacaactcctctgcaagaccatgcccagactttttttttttttttttttgagatggagtcttgctctgtcgcccaggctggagtgcagttgctattacaggagcatgccaccacacccaactaatttttgtatttttagcagagacggggcttcaccatgttggccaggctggtctcaaactcctgacctcatgtggtccacccgcttggccccccaaagtgttgggattataggtgtgagccacctcacctggccccatgcccagacttttgtattcagtactgggtacctctaggactggatgacaaagttgctgagggattacaaactcatgatctaggaagaagccgggaagagacttttttttttccctagatggagtcttgctttgtcacccaggccagagtgcaatggcacaatctcggctcactgcaacccctgcctcccgggttcaagcaattcttccgcctcagcctccagagtagctgggattacaggtgcatgccaccatgcctggctaatttttgtattttttttttttagtagagatggggtttcaccatgttggccaggctggtctcgaactcctgaccttgtgatctgcccgccttgtcctcccaaagtgctgggattacaggcgtgagccgccgtgcccggctgagaagagactttttaacacagtagatagcttgaaatactcaaagggatctcacaccaaagagggatgaaattcatttggaatggttccagagagctaaacaagatccaatgtatagatgaagttagccaatgggaggtggatccagcctagaatgagactgctttaatgattagagctgtccaaatacagaatggactgccttttacaatctccactgctttacaaggagctgtagagcattgggaagttggctggggcctcttttacaagtcacttatttccactgtccatttctgtctaacttgctttttaaaccagcttgccttttagcagctaatgtcctcctttattaatgcctttgaagttctttaatcaaatcatccatctttctgaatcacagtttctgttttctctccctgtcctcaattgattgaatgtacctgcaatccttgctgaaaaatagagtatttctaaaacctattcttacttttaaaaacccttcttaacaagaagcaagtacaacacgatgcataaaataaattaagcacaagtttatttctacatgagagaaactagatatttctgcctttgggagactgcgtttctgataaattttggcaacccatcaacaacagctttcagagacaccagcaggttgaggaaccaagagcataattgttatgatgatgtctaagggggccaattctgggcttaaaatcacactgtttcagcttaagagagtattccagcctccagtaaatagaaagcttgcagagaacagtctaggagggcaatggcaacgtggtaacagtaccaatgtgaacttgaaccttccttctttctgagaaacctgtaatgctgtctagctttgtttttgtctgtttgttttaaactgactacacttcacagtcattctcatgaggcaggtagttcagagaggccctctagtttatttcacaaattggaaatcaatgaacttgagttcactgaaaatttgctgaggccttcctatgggggaggccctttgcaagtcacttatgggctagggatggtgggactaattcattcattcaaacagcaggcatttaataaatgaggagcatagactagggactgttctttgtactgaggatggacaagatggacaggccctgttcttatggagcttctgtcctagagctccatgagacactaggagacaagcagttaacagctaaaccaaaatacaacatcacaagtaagcactgtgaagaaaactgaccgggcacggtggctcatgcctgtaatcccagcactttgggaggccgaggcaggcagattacctgaggtcagttcgaagccagcctggccaacatggtgaaaccccatctctactaaaaatacaaaaatgaggcaggcatggtggcgtgcacctgtagtcccagctacttgggaggcggaggcacaagaactgcttgaacccaggaggccgaggttgtggtgagctgggattgtgctgctgtcctccagcctgggtgacagagagagactctgtctcaaaggaaaaaaaagaagaaaagaaaactgaaaaatgtgatggaaggtgaattgccgagagtagccactttttaatttatttattatttaattttttttttgagacaaggtctcactctgttgttgctcaggctggagtgcagtggcgtgatcacagatcactgcagtcttgacctcctgggttcaagcgatcctctctctttagcctcctgagtagctgggactaaaggttcaggccaccacgcccagctaatttttttcttttttttttttagtagagatggagtctcgctatattgcccaggctggtctcaaactcctgggctcaagggatcctcctgcctcagcctcccaaaatgctgggattacagacgtgagccactgtggctgggtagccactttagacagcaaagacatctctgaggaggggacatgtaagctgcgatctgaatggaaagagaacgacacaagtgaagaagatctgtgggaagagcattccatacaaaggctgaggtcaggaactcctccagaagctcataattgcaccagaggtgcttacaaccccaagcagtgacagtggcacagaatattcaacatcaaatgcctaagctaatttccaggctgagaaaggtaaaccatccttctcctgcctgcagtgcttctatcggtcctgaaagagacagaggaggtaagggagaagaattggtacgaaatggtgcagagctggtctcagagggcaacaacagccagccctccatgaccacactcccaccgtgcactcacgtgcccctcttgaagcggctctgatcctgtgacctaaccagtttccacctggcttctctcagtgcgttgccatatagtataattttttgtttgtttgtttcgtgtagggttttgttggttcttttccaagtatcaatcaaaactacatgccaacgtccactccttggaaataattaaatgacatgacgtgcctgattttttcagctggtgatgcactgtaatttgcatctgctgaaggaatttatcttaagtcctgaagcccagccacttgagacaactgaggtgatttttctgctctgcttttgctcatgcggatggtgcgttattgttaaacacaaaagtggactaattgcttcattctgcaacctactccgtgaagaaagctgctcttctttgtgaagagaatatgttcatgttttgttcatgaattccatgcaatttcccatccccttgttaagtaatgtagcttctttatattggcaaaattccctttatcttgctgtgacctgcgctttgtcctcccgagcagagcaaatcatctgtggtttaagagcagctttggattcaagtccccttttctcctgtcgagggaagtgagtctatgaaatggccttcatctgaaagccacagcgaagcacctcctagcccaagtctagctgctgtgtggcagctccagcggcgtgaactgtgactgccctgcagacacctatcaagcgctgcgtcagctattaataataaaatcaactcttctccctcccccccgcgaggggggttccctcgtcagggcccagaacccgctggggaagaatcggggctggcgtgcgaaggagctggcggcagggggtgtaggatgcggtgttcccgaggcgacagatgaaggatttgggttgtgtgggaagtgaactgcggaattcctccccttggtttctgaggggggctctgaaggagccagattaggatgcagagcgcagcccgggcgaccgagggcgaggaggcgagccaaggacatcagcccgagggcgcctcgagacgccccgcgtggaccgcgctcccagctcctcggcctcgccttccaaccatccgcccaccggccccagagcagcgtgcccactgtgagcgccccaccctgcgtctgcaggtgggtgggtcagagaaccgcaggcacagaagagggtacccagcttcccctccgccagccccgcgaccgcggcgcgcgcggcctcgatccgggttcctaggggcggcgcgcgggagggggcggggcctgcgcggcagcgtgggcgccaggcgcgcgggaggagggagccgggaggagggggcggggccgcgccgcccgcgccgcgctgggcgctctcggccaatgagcggcgtccacatgccgcggcggcggcgaaaggggaggcagcggccgataaatgctattagagcagccgccgcggagccgtccccgacgccacctccttttccttcgycgcagtttcctccgccgctgtcgggcgtgcggcgctgagggacccgggcgagcgcgccgcgcaccgccccgccggctcgcctccctcgscgcgttccgccctcagtggtctgccgggcgccccctcctccggcccgggcggggcctctgatcgcctcaagagagcggggagggggctcgggggccgcggcctgccctcccggcgggcggctgagggcgagggaggccctcccttctggcgaggggagggagggtgggtcaggagcccccaacccgccctgcggagctcggggccgcgcgaggggcggttgtctgggggagggggcgcggggtgattcagcgcccggcgaggcggaagcggccgcaagaggaggaggggagagcccgtccgcgcctgggctcccggggtggcacgagcccgcggccggagtgcgaggcggaggcgaggaggccgcggggacgggaggcgaggccggccgggcccccgaagccatggagaacgcgcacaccaagacggtggaggaggtgctgggccacttcggcgtcaacgagagtacggrgctgagcctggarcaggtcaagaagcttaaggagagatggggctccrmcggtaggtgcagggcgctccgctgcaggggcccggcgcggccgggagagccagggaagatggctgaccgggctccacctcgtgggcttcggctccgcgcccgccgacagctgcgggcggagggtcgggccagcgcgccggccccgcgggagagaaaggggctgcggtcctcgcctcgccttccctggacctcttcgcttctcgggccctcgaccttttcggcgcgcaaggctcggaggcttctctccagcagcagccggccccggtggagggagggacgtggcttctgcagctaggttgagcccggcaagacgttttctcgtcccctgccgatttatgaggagtcgaggtcgttggaaggcctctgaccgttcttgtcctacccaaagttacacatctggcagaagtgatgacatcgctgaaaccactcctaggttcaggagcccgaagtgatttcacgcttagggctagacctcaggccattgattacaaagagtgcatgcttccttgagatatcttcgtggtatgccctctgctaaaaaaatcggatattcttatagctaggtctgtgttttaaagatattgatgcttagaattgtagcagttctttttagaaaaacgaagtgctaaaatgtctctctctttttttttttaacctccctcttgacacattgcttgacgaatttctacattctacagagttaccggctgaagaaggtaatcttaacatgctgtttctgttttttttcctctgttggtgtgctgatggtaagatgacagttaaaacacatgtgtttgtttcttacaggaaaaaccttgctggaacttgtgattgagcagtttgaagacttgctagttaggattttattactggcagcatgtatatcttttgtaagtataaaaaaatttattttctttcccccmaaaagctgaaagtattccatagataaatcagaaaacaaatgatgtccattgggtgaaaacatatttggagttgcaagctgtgtctctatgtttaaaaacaatctgggcattttaaaattacaaaacaaaacacttgaagccattggtattcagaaaatagatgcctgacatttacagtgtggttaggagttgtcccagagtgtggcatggtcttagaaattcttgtggtttatcagcttttaatatcaaaaagttcttttctgggaagcctttaatgttttgggttcttccattgttatcgtgttgtaagatcatactaagatgatgttggactctttgtagtctgtaaatagaacttacaaaaggaatrttccagttgctttcccttcctggtaatggcaaggtgacagttgttcctgacggtgacaagaatgatgacggctgtgatggcacccttgttgaccaaatttggtcactgacctttagggtggtatatttatctaaattggacccctgtcttaagtgattcttaggttgaaagaacaaggtttagtacagttggttctagatcttaaaggaaaaaaaccagcatggtgttttttcttgttctgtgtgtgcttacccacttgagtgctatatggttgctaagaaactagtgaaatgcaaagaactacagcagaaaaagggtgttggggtggcaagtatatttctaggtttttaacttttttttaaatgttcggtattaattttttgttgcattttttttcttgggcagtagattgcttgctagttttcctaaaaatggtcaggaataggacacagatgttcctaattctaatagcatgagatgccttttattcttgaattacrttattcttacaaaaaccacgataagtgaaattcacccagtgcagtacttctttctagttaaaacaaaattgacaaaacttcacggtttcagttcttgtacatatatgtatgcaggtcccagggatcagcctcagtctttgtgagaaccataccrtagagggctattttgagaacgaaataaacaaagcagtgggcatttatttagttcagatgaggaaaagattaaatttatacccatcttttaagtagatagtggcagcagtaaataaatttgtggaataatttttacataaatcctgctatgatactttattatgccatattagccaagyattgtgtagccattaataattcagtccccaagaaccttttctgtggttttcattgattaaaatggggacttacatagcaaaccattcagcattctgagtcagtcacaatgtacctcygataaaatgtttcttcttgattgattaaaaaattttcccccagaaaatggctgctgttttaccaattaagggaaatgagtagacccgattaactatagtttatcaatacattgtcatggggcaaaataaatgatacatttggagctagtgtaagatttgtatttaactgggtacataatagcgttggcagttaartaatggggtccgataaggtcattgggaacttcttaaaaattaatcagctgactacaagccagaagcaaaatacatttttactgaattctctgtgttacaakttgaagcagtgtgggaaaccatgccactggtgttactattggggttgcactgggtctgttttttgagtggccagtttgagtgacttyatattagcattttaaattaatgatgtgtgtgggttttgtttgttcattttttactttgaagtaattagaggcttatagtttgtaagcatttcaagcaggtttttaaataaatgctttaattttttttataagataggaccttggctttgtggagcattatagagctatattttggagttgaaatttgagctcctttttggtaactgtggagttactgctcaggaaatgaactgtgttacatttttattttatgagttggtaaatagcaaaagaataagtgtttagggagtacttctrtagaattaatttgctttggtttgtttgatcaaggaattgcagatataagacctgttgtgttgattttcttcatgtggggttgggtactgctgctgcattgtctttagtgtttcattcctcctgtctgtatcttttaaaagaaagagcactgactctctttttgtgtcagtttattcctattgatgtaacagaaaaaacatggtagaatattcaggtttttttggagaagtgactaggcgattcttatatacatcatgcgtcatcaagtcatgcttaaattaaaaagaatattagtgacttacttcaaatatcaaactaagtagtaaactgttaactatagttaatattttgctgtggcatagaataggaagctatgcttgtgacctgtagggatctagtttaatttgtaatattggccaaagtgtttttttgaaacggtcacttggattgaaagaaataagcttcatcttccagtgcatatgaacattagaaattgcttaatttgacactgaagaccccccctctatcattcactttatcttttcattctcttcttgattaccaactttgytctaaatgtaacacatcgtatggttgcttaactgatgcctgtcctttcttctcttttcctgctttgttaagatatttattgagcacctgtcacagacactggggatacagtagtgaataaaacagacagagacccttacctggaggataatactgctgagaaaaataaagcaagggggtttggatatcagagtatgtgaaagggggaacagttttcaaattgggtggtccggaaagttcttgaggaaggtgacatttgcgaaaagatctgaaggaggtgggcattagggccatgttggtctcccatctgtctaaatcataaagtcataattaatatggtaataatttgcataggtttctctaccttycaccgtcgtttcccatgtcagctacttagattgaccctaaaatgctaataaaactttctagactgtggtacttctcaacctttaggttacatttgaccatttgcatgtgtgtgtctcttttcttcctactagacccccttgagttagtgcttttttttttttttttttttaaatgtagatggagtctcactcttgttgcccgggctggagcgcagtggtgcaatctcrgctcactgcaacctccacctcctgggttcaagtgattctcctgcctcagcctcctgagtagctgggattacagatgtccaccaccacgcccggctaatttttgtatttttagtagagatggggtttacctttgttggccaggctggtctcgaactcctgacctcaggttatcacctgcctcagcctcccaaagtgctgggattacaggcatgaaccactgcgcctggcctaagttagtgcttttgatgtcacaaaaacttgggtgagtttgtttcagtagaattttctgaaaatacatgagatctttttactgtagtttctcagaagagaatactcaaagcatttgatactggatttgtagtgattttaattttcttctgtatcttttaatttttgattttaaaaatgggataagaagggcaaattactgattggtttaactagtttattcagagcttttcttaaaataatgayttgaaaggtggatttaatagagtactttttaaaaagattgttttctcatgcctgaaagcattgaatgtttttacatagctttatatctggatcagaagggaacgagttctaattcatgcttttttttccgttttattaatgactgaaagtcctcccccagaaattatcgtaacgtttattggtaattctctgtatcattctcgaaatgtttaatttccatttcctctttatttaaaaaaaaaaaaaaacttgatgtaaatttcttcatttattgagcaattgtttgagggcccaaaggcacagtgcaagtttctgagaatactaggagcaaaatgtgcttatgatctttttaagcacttttttctttcgttttctttttatgatactaagagctcttcctattatcacagtgtatagatatctgagtcacaatatcatgactgtctcccagtttacagcagaacgtgctttttaccttggattaaaatttgctttatttggccgggtgcagtgagtggctcatgcctgtaatcccagcactttgagaggccgaggtgggtggatcatttgaggtcaggagttcgagaccagcctggccaacatggtgaaaccccacctgtactaaaaatacaaaaattagccaggcgtggtggtgggtccctgtaatcccagctrctcaggaggctgaggcaggagaatcgcttgaacccgggaggcggatgttgcagtgagccgagattgcgccactgcactccagcctgagtgacaaagtgagactccgtctcaaaaaaaaattttttttttgctttagtatacttatcagaagtataatgcagtacagagtgttgtacagtatttcagtgctgtacagagattaatcttgtggataataattgggagatactctatccctactctatttttaacagtttaatgtagttgagtgttcattagcaagtggttactttgaataatactggcacatttgaagcattgaacttgtttgataatgtatgtcccagaagacaggtattattgtatttagcacaaagcaaagggaagaagaaacactgtttatgtccaaaactatggggcagtggtcttctcttttacttttctttgctgctgttcatgaagcttgttaccttttcgctgtcttttttttgagacggagtcctgctctgtcgcccagattggagtgcagtggtgcgatcttggctcactgcaacctccacctcccagcttcaagtgattctcctgcctcagcctcccgagtagctgggattacaggcatgcaccaccacgcccgggtaattttttgtatttttagtagagacggggtttctccatgttgaccaggctggtctccagctcctggccttaggtgatccgcctgcctcagcttcccaaagtgctgggattacagacatgagccacctcacccagcccagataatccttttacacactgtttaaaattttcaattttcctggagatagggtctcctgtcgcccagcgggtaaatgcagtggtgcgattatagctcactgcagcctcagacacctgggctgaagcctgattcttgagcctcccaagtagctgggactataggtgtgagccatcatgctttgcccttttttttttttttttttttttttgaggcagagtctcactctgtcacctaggctggaatgtagtagtggcacgatcatagctcattataacctcaaactcctggtttcaagcaatcttcccgagtagtcaggactacaggcatgccctgccatgcccaactaattaaaaaaaaawttttttttatacacatagggtctcactatgttactcaagctagtctccaattcctggccttaagagattttcccaaagcattaggattataggcatgagccacctcacccagctgaaacagataattctttttttttttttccttgagatggagttttgctcttgtcagccaggctggagtgcaatggcgcgatctcggctcgctgtaacctctgcctccyggggtcaagcgattctcctgtctcagcttccccagtagctgggattacaggcgtccaccaccacactcggctaattttttgtattttagtagagatgggttttcgccatgttggtcaggctggtcttgaactcctgacctcaggtgatctgcccacctcagcctcccaaagtgctgtgattacaggtgtgagccactgctcctggcttgaaacagataattctttatrttcaacctgttgtcaaaatttttagaaacattttcccagttccttgtataagtatactttgtataacttctggcaaaccataattatgaactcacattactatagtactataatactgcagtaagggatcttgcgtttcagtaatgtcactcatccagttttcctcccctttctcttaccccatctccctcccagtctcatggtttytgttgtcaatcctctttctccttacacaaggcaagaggttttcttaccaatagatcagaactgtgaaggactgcccgacatgatctgatatggttgttcttcattttgggctgtagtattttaaagtagaggtttgctctgatggtcccatcactgcttgccattgtctttccctttgctctagctatcaggggatgttgctttaagtttgttscccaggctttactgccaagagggaaattcatacccactttaacaaggtgtgaagcttatcttacagttgctaatgcctcactgaccttttggaaaggtcatagttactcttcaagttgagcgatttttctcccccaagagctaattaaagtttcttgtttctgatatgctctccttggcaaatgtttgaaagtctagtatcagagcagctgtgatcctgcatctatcaaaatttataacttcctagagaagttttcattctggcattattcctggccttaacactagaatgccctgttgaaagcatacagtaacatttattatactcattctggttgtctgtttgccctagctcactggacrttggtggtgattggcatctgtcaggacttggtggtcctggtgcctcctgtttttatttttctttttgtcctgctcaaacagatatttcttattcatgccgtcttctaatgagtcatttggattcattattgccataaatcatttggaggagtgttttcatgatttactaagtagatcttttaaagaagattttattatgaaatatgcaaacattttaagcaattttttaattaaaaaaaattcgacctccaagattaaatcattagatgtggttaacactgtttctggattggtaagtttccacaaaaagaggtttttaaatttttaaccacatagaccactctttaccatattcattattcttagtattcattgtggtgagttctctctttttaccacgtttatagttgttggattgggaagtgcagtgtgactcttactttgtagtttttaaatcttaacargtttatagttgtatgagctaaaagtttaaacctctgccccattttcttggggcagtgttctgtgaccagttrcatttttggacttaggttatctctgaagtgctgtgttgctgtataaatgtcatatggaggataacctacaaaatacacttcggatctcccaacagctttgcggttctgaaacagccttcagtagtaccactgaaaagaaacggggaattaactggttttttgtttcttttatagagatgagggtctcgctatgttgcccaggctggtctcaagctcctggcatgaaatgatcctcctgccttggcctcccaaagtgccgggattataggcatgagccactgttcccggcctagaattaaacagtttatatatgctctaaaatttaagtcagtgatcaagttgtttatactgtggatttatgtcacatggatattacttgatatgaataataactaaatgaacatgactgttagatgatcaccttttactttaatcaagaattgaagttttattttttctaaatagatacatataaaatgaatggaatttattccctctccccagattttatttggattctaaaatggaattattacatcaaaagataaggtatttttaagaagtatagttgtttttttgagactgagtcttgctctaacgcccaggctggtgtgcagtggtgcgatctcagctcactgcaacctttgcctcccaggttcaagcgattctcctgcctcagcttcccaactagctaggactgcaggtgtgcgccaccacacctggctaattttttgtgtttctagtagaggtggtttcaccttgttggccagggtggtctcgaattcctgacctcaggcgatctacctgtctcggcctcccaaagtgctgggattacagacttgaaccaccacacccagccatgaagtatagttttttgtttgttttttgagttttgcttttgttgcccaggctggagtgcaatggtgcgatcttggctcaccgcaacctctgcctcccgggttcaagcgattctcctgcctcagcctcctgagtagctgggattacaggcatgcaccaccacacactgctaattttgtaattttagtagagatagggtttcttcgtgttggtcaggctggtctcgagctccagacctcaggtgatccccccgccttggcctcccaaagtgctggaattacaggcgtgagccatcgcacccggcttttttttttgttttgagaccgagtcttgctctgttgcccaggctggagtgcagtggcacgatctcggctcactgccacctccgcctcctaggtacaagtgattctcttgcctcagcctccccagtaggtgggattactgacacacatcaccatgcccaggtaatttttttgtatttttagtagagacggggtttcgccatgtcggccaggctggtctggaactcctgacctcaggtgatctgcccgcctcagcctcccaaagtgttgggattacaggtgtgagccactgtgcccagctgaagtatagttttgactttcaagaattcttatgaacaagacatagccagttgtttatataattgcattttctaccgtttatttctagagaaagaaaatagattttgtctatcataatccctttagtgctagccactttttttttttttttttttgagttttcgctcttgctgcccaggctggagtgcaatggcatgcagtacactcacggctcactgcaacctttgcctccccaggttcaagtgattctcttgcctcagcctcctgagtagctgggattacaggcacctaccaccatgtccagctaattttttgtatttttagtagagatggggtttcgccatgttgggcaggttggtctggaactcttgacctcaggtgatcgcctgccttggcctcccaaagtgctgggattacaggcctgagccaccatgctcggccagtgctagccactttttaaaaaagtgacattaagcctaaaaagacacattctaacrtgccatttctcttctaggttttggcttggtttgaagaaggtgaagaaacaattacagcctttgtagaaccttttgtaattttactcatattagtagccaatgcaattgtgggtgtatggyaggtaagcaaaaattcctgtactgcaaaatttcaataagttatgtaagtgattagggctgtattaatctttctgttatctgtttttcctgatgtgttgagtaaaaatatgtttgcgggaagtttacatgtattttccctttattccataaattaattgttttctgacacagtctcactctgttgcccaggctggagtgcaatggtgttgtctcggctcactgcaacctcttcctcccaggttcaagtggttctcgtgcctcagcctcccaagtagctgggactacaggcacgcaccaccacgcccagctcatttttgtattttttggtaagagacagggtttcaccatgttggccaggctggtcttgagctcctgacctcaagtgatccgccctcctcagcctcccaaagtgctgggattacagacgtgagccaccatgcccggcctattaatttaattaattgcaaatttttgaccttaatgcatataaactttgcagttaagattgctcattcttcgccaagtgtggtggcaccagcctgtagtctcagctactcaggaggctgaggtgggagggttgcttgaacccaggaggtcaagactgtagtgagccatgatcgtaacactgcactccagtctgggcaaaggagcaacactgtctcagaaaaacattgttcattctttacggtagcaaggaattaaaatgggtgagagaagctgcttaaggaaatgagaatgtgagaaccattatctttatgtctcytagttgcttcctgtgacaaactttaaaagctacatgtcatttttattctccttgggtttttttggtaggtttagctataaaaattgtttccccttcwgtgcttactacagactctgagacttaaaattcatgttaagtgttgatcttttaggtatttgacggatataatcacccctttgaggactgaagtagaccttttttttgtttttgttttgagaccgactctctgtcgcccaggcaggagtgcagtggcacgatctcggctcactgcaacctccgcctcccaggttcaagcagttctgcctcagcctccttgagtagctgggattacaggcacctgacaccacacccagctaatttttgtatttttagtagagacggggtttcaccatcaggctggtctcaaacccctgacctcgtgatccacccacctcggcctcccaaagtgctgggattacaggtgtgagccaccactcccggcctttttttttttttttttttttgtttgtttgtttgtttgtttgttttgaccgactttcactcttgttgcccaggctggagtgcaatggtgcagtcttggctcactgcaacctccacttcccgggatcaagcaattctcctgtctcaccctcccgggtagctgggattacaggcacgtgccaccatgcccagctaacttacttacttttaatagagatggggtttcattttgttggtcaggctggtctcaaactcctgacctcagatgattccccctgccttggcctcccaaagtgctaggattacatgcgtgagccaccacgcccgacacatcttataaacatacttagtcctgttgaaattgtaaacttctaatctttaccaataaatgttaacgatctttatgtggtaggttcatagaaagatggcctacttagagatttgtaattgtgccatatatatgtgtgtgtgtgtgtgtgtgtgtgtgtgtgtgtgtgtgtatatatttttttttttttttttttttttttagatggagtcttgctctgttgcccaggctggagtgcagtggtgtgattttggctcactgcaacctccgtcttgtgggtttgaacaattctcctgcctcagcttcccgagtagctgggattataggtgactgtcaccatgcctggctgttgttttttttgtttttttgagacagagtctcactctgtcacccaggctggagtgcagtggcatgatcttggctcactgcaagctccgcctcccgggctcacgccattctcctgtctcagcctcccgaatagctgggattacaggtgcccaccaccacgcccagctaattttttgtacttttaatagagacggggtttcaccgtgttagccaggatggtctcgatctcctgaccttgtgatccgcctgcctcggcctcccaaagtgccgggattacaagtgtgagccactgtgcctggccttcttcttatgtttttctcaaaaaaattatatttggtcagggcatggtagctcatgcctgtagtatcagcagtttgggaagctgaggcgggtggatcagttaaggtcaggaggtcgagaccagcctggccaacatggcaagtccccgtcgctactaaaaatacagaaagttagctgggtatggtagcatgcgcccccagctacttgggaggctgaggcagggcttgaacctagggggcggagtttgcagtgagccgagatgatgccactgcactcgagcctgggcgacagagctagacttcgtctcagaaaaaaaagattcgagtttttaaaaaaagaacattcttaagtctttagtatactgaatggtatgagcagcaatagagggttgtggccttctgaaagtaaggaaaattataatgacagtataaggtagtatgaggggcatagtcttttatttctgaccagtgtcatcaaggagggctttattttttttaagacggagtctcgctctgtcaaccaggctggagtgcagtggcacgatcttggcccactgcagcctccacctcccggactcaagagattctcccacctcagtctcccaagtagctgggattacaggcgtgcaccaccacgcctggttaattttttgtatttttagtagagacagtttcaccatgttggccaggctggtctcgcactcccaacctcaggcgatccgcccacctcagcctcccaaagtgccgggattacaggtgtgagccaccatgcccagccttttcattgattgtaattgtcatctttgttctcagggtcagagataatttatcttttttttcccccaagacagcttcactcttgcccaggctggagtgcagtgtcataatcacagctcactccaatctctgcctcgcaggcttagtgatcctcccacctcagcctcctgagcagctgagactgcaggtgtatggcaccatgtcaggataatttttgcatttttcgtagagacactgtctcgttatgttcagcccaggttggtctggaactcttgggctcaagcagtcctcttacctcagcctcccaaaagtgctgggattacaggcatgagctactgtgctcagctgataatttaagcacatgcaaaatacagtgctcatgggatatttgtttaaccttgagcagtccagttaaattccacccaacatgatcttgaagggtaagaatgtctgatatgagattgaaattaactttatcatgaatttcccaattaaggtttttttatactttttctggggtatatacatcaaaactgaggtacacgtgttaccagctttcatctttgtgtcatttgattctctttaggctggtttgattctacaacttccattctgaaatcgggaagaaaattactgtgacttctaacggttgatagttcatatatgatgtcatgagaaatatatagcttgggactggcagtgctatgatgagagtccagccattcattggtctttacaactggagggatagttcttagaatttgtgagagatactcatcactcatagcatttactgtgtgcccaaacacaatctaagcatgttacatatgacttcttatcctcacaaaccttgaggtaggaactgttagtgttgtcattttatagacagtaaacttgtgtgttgtgtaacctctctacagtgacatagctgttaagagcctgtattgaacctgggcagcttagcccagagttgggttgggttggggttttttttgttttgttttgttttgtttttttgacatagtctctttctgttgcccaggctggagtgcagtggcaggatctcgtctcactgcagcctccgcctctcgggttcaagcgattcttctgcctcagcctcctgagcccagactattaagctgtactgcctctcatgagacagaattgattttaaatggcagggggatttggctaaaggtgaaagctgtgttttacagtcttagggacagcagagtctgtaattgcttttcctcattgttttatccccttagcttaattgagggtacttaacgtttcgtttttaatacaaattaataaatgtccttgtgtctgttgccttagatgtgaattgtttagtacaaatgttactggtgggcttcctttctttttaaagattagacctctaacattttattccttgggttagaaataattgcagtgtcaggcaggtctttactactcttctgttttcttttatacaggaaagaaatgctgaaaatgccatcgaagcccttaaggaatakgagcctgaaatgggcaaagtgtatcracaggacagaaagagtgtgcagcggattaaagctaaagacatagttcctggtgatattgtagaaattgctggtgagttgagtttgtcatttttcttttattctagatagtatttctgaatgtagtccttttctcaaggctcataattatatttaaaataattgttttcatgtatcaattaacacattttattgccattcatacaaatcctacattctctaaaattattttgaaatgttttagcacctcccttcctgtcattgataaggcttttggtttttgtttttaaacaaggtattttgaattctacttgtttaaatacattgtagaacacaagtgctagagaggtaaaacctaatgttgatttgacagttagttatagtgaacaatttgttagaatactggctaatgacgacacagtttttcctgttttgtttcttggcaccaaagttcatggtcaagggtartttcttgactctgaaagctatgcttggccaggcttggtagctcacgcctgtaatcccagcactttgggatgccgaggcaggcagatcacgaggtcaagagattgagmccaccctggccaacatgaaacctcatctctactaaaaatgcaaaaattagccgggcatgatggtgtgtgcctgtagtcccagccacttgtgaggctgcagcaggaagaatcgcttgaacctgggaggcggaggttgcagtgagctgagatcgcaccactgcactccatcttgatgacagagtgagacttcatctcaaaaaaaaaaaaaaaaaacagtatgcttaaaaatacttatgtgttacactgagccaggagtctctgcctgaattccagagatagcttcaaagagtccatgaatccactgtgagtccagaatgctccacagacctccaagggtcagtatcctcactgctgtagattagtgctgtttttttgttttgttttgttttgttttttgagatgggagtctcactctgttacccgggctggagtgcagtggcatgatctcagctcactgcaacctccacctcccaagctcaagcgatcctcccactttgccccccaaatagctggtaccacagatgcatgccactacactcgcctaatttttatattttttgtagagagggagttttgccatgttgctcaggctagtctcaaactcctgagctcaagtgatcctgccttagcgtcccaaagtgctgggattacaggtgtgcccagcagccatatttctgacagtccaaaatcacaacacccctgggaccaaccaggatagtctaggtgggttgtttgttttggctatttcacttagagagtcattgcatactrttattcagattatctggcttttcatacccttctgagttaagtatactatttactttgttgctatttgtgaattatctcatagtaatatgcttttatattgacttgggaagggtgtgctttgtctttattgtcttactcattttaatgaattgaaagagctgcattccttaacccatgctctacaactttggcctctgaaaggaaattgccttgtcctattctctcatccagaaatttttgttgttyctccagaaaaaaaggatagtgttacatatatgccagtaagccaattatttgggactgtgtagtgtttgtgtgtaaatggtgtgtgtaaatgatttaacagcttccttaagtatagtgttaagaagagtacaactcagaatgaaatgtcttggctattggattttttaaaacttcctgttttggccaggcgtggtggctcatgcctgtaatcccagcactttgggaggctgaggtgggcagatcatgaggtcaagagatcgaaactatcctggccaaaatggtgaaaccctgtctctactgaaaatacagaaatcagctgggcatggtggctcccacctgtagtccgagctcctcgggaggctgaggcaggagaatctcttaaacccaggaggcagaggttgcagtgagccgaggtcgtgccatttcactgcagcctgggcgacagagccccagactccatctcaaaaaaacaaattttctgttttgacacaaatgttatactatcacagatgtattattttttcactctgtatacacacatttttgtatgaactgttgaagggtatattgcaggcatgatgcccctttaactcctaaataacatttgttttatagtatcaaggatgttctcttatataacctcagtatgattatcagaattaggaaattgatgcaatagtatgtaagatcttattcagaatttaccagttatcactttttttgatgaggggaagacagggtctcaatctgtcacccaggctggagtgcagtggcaccatcacggctcactgcagcgttgacctcctgggctcaagtgattctcccacctcagcctcctgaataactgggatcacaggcatgagcaaccaagctcctagctaagttttgtatttttttgtagagatgggtcttgccctgttgcccaggctggtctctcaaactcctgggctcaggcagtcctgcctcagcctcccaaaatgctgggattacagacgtgagcccactgcgcctggcccacattttttttaatagcaaaaaatatttgaattagggaattctgatggtgatgaagaaaataggtcagaatggggaaggctgaagatatagggaggctattttagtagtctaggcaagagataatgaggacagtaacattaagaataatgaaggaaagatttttgagttcatgaatagtggctcttaagcaggagtgcacatcacaatcatctgggggcactctttttaaaaaagtttttggcaggtctcaacctagaatattaactctgaatctccattgggtacagagttctgatcgtgagtagttcaaagagtgagcctctgacttagttacaaaacagcagatttgttttgttttgttttgagatggagtttcgctcttgttgcccaggctggagtgcaatggcaccatcacggctcactgcagcattgacctcctgggctcaagtgattctcccacctcagtctcctgaaaaactgggatcacaggcatgagccaccatgtacctggctaagttttgtattttttttgtagagatgggtcttgccatgttgctcaggcttgtctctcaaactcctgggctcaggcagtcctgcctcagcctcccaagtagctgggattacaggcatgcgccatcatgcccagctaattttgtatttttagtagatgtggggtttctccatgttggtcaggctgatctcgaactcccgacctcaggtggtccgcccgcctcagcctcccaaagtgctgggattacaggagtgagccaccacgcacggcctaaagcagctccttccgtcagtctgtccgtccgtctgtccttccttccttcctccccctttccctcccctcccctcccctcccctcccctccttctgtcctccctcttttccttctttctcgctctctcttttttttttttttttttttaacttggagacaggggcttgctctcttgtccaggctacagtggagtagtgtgatcactgcgacctcgaactccttggcttcaagggggtcctcctgcctcagcctcctgagtagctggtaatacaggcacatgacaccatgcccagcttttttttttttttttttttaaagacggaatcttgaactgtcgcccaggctggagtgcagtggcacgattgcggcccactgcaagcttcgcctcccaggtttacgccattctcctgcctcagcctccccagtagctgtgactgcaggtgcccaccaacactcccagctaattttttgtatttttagtagagacagggtttcactgtgttagccaggatgacctcgtgatcctcccgcctcagcctcccaaagtgctgggattacttacaggtgtgagccaccatgcccggcctttttttttttttttttttaaagtaaagatggggtcttgctttgttgtccaggctggtcttgaacttctgggctcaagcgatcctcctcctcctgccttggccttccaaagtgttgtaattacaggtgtgagccactgtacctggctcaaagcaacagattttgataatagataggagagtgtgtaaatcaaagatactggcaagatttctagtttacgtgactgggtgtgatgatggtactctactacctacagaaggaaacattggaaaggagattgtttttccacaaatatatgtggtgggtgaggttgtagatgacatcacctaaatatgtgtatgagattctgtttgattttatgcttacagtttctccagcttcttcttgtttaatttttttaaaaaaatagagacagagtctagctatgttgcctaggctggtctcaaactcctggcctcaagtgatcctcttgccttggcctcccaaagttctgggatttacaggtgtgagccactgtgctctgccttgttgggctgttttagtgtgttgagtctacttgaagccttagagaaattacccccaaagcctttatccttagtttgcatcagtagatggcaatggtagacagcttcagaggaaactacaactgtgatacctcaaagcaccatcctttttgaagaaagagacaaaagccagcttctcttcagttggtgattctggtttctctgtatctttgaatcctgattcttgccagtccttcccgtcttttgtaagacactctaacctaattaactgtgagaaacttggaagtcatcttgattttttcccccctcttatcctctgatttgtccgtaaggccactgattctgtctccagaacacacccaagttcgtgaactccgtttccttggtcagcacactagtctagccatcatctcacaccgcagctgtcatcatctcctaactaggctctggcttcctttgttgtcttcctccagtccattctccacacaagtgccagagtggtttcttaaaggttgtgttatttattcatctgctaaaaaacccttaagggacttccccattgcacttaaaatacaaaattctctgacctgataaacttgcattgtgtgtatgtacctcctgctttcttctatgatttcatcttgtgctgctccttcatgttgcagacatccaggcctttttttcagttttcagtaccaccaaagtcacctttttttggaaggttaggcaaattttatagagtttattaatttgctcaatgcactgatcttatggtggtgaagctttgattattaccctgacctatctcgctttctcacactgaaatttcattttctatattgtaatatagttttgttgttgcatttgatagtttagaaaggacaaataatgtttgatctatagtgtatgtgacttaagattttcagtctaatgggattttccttatttatattgtggtaaagtatacatattataaacttacccattttaaccatttttaagcgtgcagttctgtggcattaagtacattcacattgttttgggactgtcaccatccagaacttttatcttccctaactgaaatgtacaccttaaacactgacttccagttcccctcttccctggcccctggcaaccattccctttatttgaatattcaaaagacaatgaatttaatattcaaaaaaaacctgagtttaaatcccttaggtgaatatactactactataaagtggagtacaaatttaaatccattttcctttcacctgtttctgaatccttcatagatagtgctgattctggtagttatttaccactttttttccccagctcttcccccacagtatggtaattgctaaaaagcgtatatattgctttgacgttgggctctgtttttctttaatttttatttttattactattattattattattattattattattactattttgagacagggtctcactctgctgtgcaggctggaatgcagtagcgtgatctcggttcactgcaacctctgcctgcctgttcaagtgattcttgtgcctcagcctcccaattagctgggctcaccagcatgcaccaccacacccagctgatttttgtagttgtagtagagatggggttttgccatattggccaggctggtctcaaactcctggcctcgtgacccactcacctcggcctcccaaagtgctgggattacaggcgtgagccaccgtgcctggcctattattattttagttaagcccagctgtgtgagacattgggctcttaagtgctgcttgctttcgtcttaaattgtgacctttttaactgagtaatgcagaacagacatctaggtttagaatgtatgtgggcattttattaaatactgttgtcatactactaggcagtgagcaccttaaggacagaactgtcatattgactgttgtaacgttatcgtaagttctctatgaatgaaatttgaaatcagaagtatatgataggctcagctaatgtaaacatagttgctgtgcagaacaaacagttgaagtgtatgtgtgtgttcaatacaattattattataatattatacagacagagtcttgttctgtcacccaggctctagtgcagtggtgtgatctcggctcactgcaacctgtgtacctcccagtttcaagtgattctcctgcttcagtctcccgagtagctgggattacaggcttgggccattatgcctggcttgcttgcttttttgtttgtttgtttgtttgtttgttttgagacgagtctcgctctgttgccaggctggagtgcagtggcatgatcttggctcactgcaacctccgactccctggttcaagcgattctcctgcctcagcctcccgagtagctgagattacaggcacgtaccaccacgcccagctaatttttgtattttttagtagagacggggtttcaccgtgttggccaggatggtctcaagcccctgacctcgtgatccatcctcctcggcctcccaaagtgctgggattgattacaggcatgagccaccgcgcccagccacgcctggctaatatttttgtatttttagtagaggcagagtttggccatgttggcccggcaagtcttgaatttctggcctcaagcgatccacctgcctcagcctcccaaagtgctgggattacaggcgtgagccactgcacctggccttcaatacaattattgaatgccagattattagtatattcaaggtctgtgtgatcctcattattatcttaattccagaacattttcatcaccctcagaaaaacccatacccattagcagttgttgccctgttttcctcccaccagttcctgacaaccacagtttattatctgttttgtggattactgtctgtttttctggatattgcatataaatggagtcaatcttggtgactggctttctcttagcatagtgttacatttcgttcatgaatatagcatgtatttcattccttactgctgaataatgtttattagttgatggacatttgggttgtttccagttttggtctattatgagtaatgaatagtgctataacttgtacatacatgcttgtactaatttttgtgtgaacataacattttctctctgttaggtatgtacctaagcatggaattatggggcctatagtgactctatacttaacattttgagcagctaccaaactgtctttcagaatggtggtgatattgttctacattcccaccaacaatgtatacaagttccagtttctctacatccttgtcaagacatgtcattgtctatcgttttaaagttttacccaggaagtgagtatcattgtggttttgacgtccgtttccctaatttcttaatgatgttgggcatcttttcatgtggctattgtccatcggtgtgttttctttggagaaatgcctgtttaaattaggttatttgtctttttaatgttgaggtataagaattctttacatatcctgccttatgaggtgtgattagcaaaattttttccccattctatagggattcctttttttcactttcttgatggcatactttgtaacatacaagtttttaatatgataaagtccacttatacattgttgttgcttgtgcttttggtgtgatgtctaagaaactgttgccaattgaaggtcacaaagactttatatattagccagtatatatgatccaggcgtcgtggctcatacctatatgatcccagcactttgggaggctgaggcaggaaaaaccacttttttttttctttttgagacggagtcttgctctgttgtccaggctggagtgcagcgagtggcatgatctcggctcagtgcaacctccgcctcctgggttcaagcgattctcccgcctcagtctcccgagtagctgggattacaggtgcacaccaccacactcagctaatttttgtatttttagtagaaacggggtttcaccgttttggccaggctggtcttgaactcctgacttcaaatgatccgcctgcctcagcctctcaaagtgctgcgattataggcaagagccaccatgcccagcctaggaaaaaaacacttttaaattagccaggcaaggtggtacaggcctgtagtctcactactcaggaggcagaggtacgaagatgacttgagcccaagagtggaggctgcagtgagctactatgatcctgccactgtcctccaccctaggcaacaaagcaagaccttgcctctttaaaaacagcaacaacagcaaaaactatggtgtgaggtaggagatccagctgctttcttttgcatgtggatatttagttgtctcagcaccatttgttgaaaagatttcttcactaatttgtcctgcaacctttgtgaaaaattaatttacaaatgcaagaatgtatttctagactctattcttactccattgatctctgtctttaggtcagtaccatactgtcttgatagctagctgtcgttttgtattttttgaaattgggaacttgggagtgtaactttgttcaagataattttgggcattctgggttccttacatttacatataaatttttaagagttgcttgtcaatttctgcagaaagcaagctggtattttcagtaagaattgtgttgtatctatagatgagtttgggaaatatggtcgtaatatcaagtctttggatccatgagcatagggatgtctgttttttttttgttttttttttttaaggtctgtcatttctttcaacactggttgtcagtgttcaagtcttgtgcttcttttgttattgcatttttggcggggggaatatttgtaattggaataattttttgtaacttgaaattggcctattggtgatatttatttatttatttatttttgagacggagtctcgctctttcaccgctatgacaggctggagtgcagtggcacgatctctgctcactgcaagctccgcctctcgggttcacgccattctcctgcctcagcctccccagtagctgggaccacaggcgcctgccaccatgcccagctaatgtttttgtatttttagtagagacagggtttcaccatgttagccaggatggtctcgatctcctgacctcgtgatccacccgccttggcctcccaaagtactgggattacaggcgtgagccaccgcgcccggcctagtgatatttatttttaattaaaatttttagattcaaggtacatgtgcaggtttgttatgtggatttaatgtgtgatgctgaggtttgggcttctgctgatcctgtcatccagatgatgagtatagatgatgagtatagtacttcacagatagtttttcagccctcgcccctctttccctcccactttttggagtgcccagtgtttattgttcccatcttaatggctatgtgtactcagtgtttagctcctacttacaagtgagaacagacagtatttggttttctgggttaactcacttaggataatagtctctggctgcatccattttgctggaaaagacatgatttcattcttttgcatggctgcgtagtatcacatggtgtatatataccacatttatttttgagatagggtctcactctgtcgcccaggctggagtgcagtggtgcgattttggctcagtgcaacctccacctcccaagctcaagccatcctcccacttcagcctccttgtgagttcaggccatcctcccacctcagcctccttgtagctggaactacagatgcccaccacgcccaactaatttttgtatttttcgtacagataaggtctcaccatgttgcccaggctggtctcgaattcctgggctcaagtgattcacccaccttggcctccgaaagtgctgagattacaggtgtgagccaccacgcccggccacaatttctttttcttgggatatatacccagtaatgggatcgctgggttgaatggtcattctgtttttagtttcttgagaaatctccaaacagctttccacgggggctgaactagtttacattcttgccagcagtgtataagtgttccccccagccccaccaccttttttttttttttttttctttttttttgaggcaggatctcagtctgttgcccaggctggaacacagtggcatgattatagctcattgagccatggctttccaggctctagtgaccctcccacctgagccttccaggttagctgggactgtaggcacacaccactatgacaggctcatttttaaattttttcgtagagatgaggtcttactatgttgccctggctagtagttgaattcctgggctccagtgatcctcccacctcagcttcccaaagtgctgggattacaagcgtgagccaccgtgcccagcaataatagtcactctgactggtgtgagatgacatctcattgtggttttgatttgcatctctctactagtgatgttgagcattttttcctatgttgactacttgattgttgtcttttgagaagtgtcttttcataccctttgcccacttttcaacagtgattttgtgtgtgtgtttgtgtgtggatttaagttccttatagattctggatattagtcctttgttgagtgcatagtttgcaattattttctccaattctgtaggttgtcagtttactctgttgatagatttcttctgctgtgcagaaactctttcgtttaactaggtcccaattgtcaagttatttgttgcatttgcttttgaggcttagtcataaattctttgcttagggcagtgttgagaagagtatttcctaggttttcttctaggatatttacagtttgaggccttacatttaagtctttaatttgccttgagttaggaattcttttttcaatttcattttcagattgttctttgctagcgtgtagaaatagttttttacgtattgatcttgtagtttgccatcttgctgaactcattagttagttttaatagtttttatgggttccttaagattttctatatacaagatcatgcatttgcaaatgaaaatgtttttacttctttctagtctggatgccctttatttcttgcctaattgccctggttagaatctccaatacaacgttgaagtaccaagagcagacatccttgtcttactgatcgtaggggaaagcatccagtccttcacagtgaagtgtgacataggtgtgggtctcataggcgggtgccctttatcatgttgaggaagcctagttacagctgtaatatttaggttgtcagtatactctggtgacctttcatggtgtttgtaaacttatatgcaaatcagaaatgatagtttgctgggttactaggaccagcaggtcattgaattgggtaagatataattctaaggcatttgcaactattatatggaacattttggaaaagcataccgtgactgtataacctgggccagataaataggtatttattttattaagactatacaygttgagccttttaaacttccacctcttttagaattagtaatcaaattgactgtgcaatctagcatttagcctgataattcagttttgtgaaaactatagagtgaactttaattctgaattttttcttgtcagtcgaaggtactatttgcgtagcctgaaagattaaatggcataaattgtgcttttagacatggtgacttttatattttcatttacattatgaaattggatgtgaaggggtttttcagatgtgttggaaaactggagagtgttgtaaactaattcgaagctgaaaataaaaaagtactgacttaacgattttgatatttgcagaaaggaacagacctttttgtagtcactgtttggaatgtaagggtcatctcctgactttaawattctttgtcagcttttggaagatatctggtaggatggttctggctgaacttttcaaagactaagctggaataggtggttttttgagggagatatggagagagagtttaaggaaactaatttttttttttttttttttttttttttttttttttgagatggaatctcactctgtcgcccaggcaggagtgcaagggcgtgatctcagctcactgcaacctccgcctcctgggttcaagcgattctcctgcctcagcctccctagtagcagggattacaagtgcccgccaccacacccggctaatttttgtatttttagtagagacagggtttcaccatgttggccaggctggtctcgaactcctggcctcaagtgatccgcccgcctcagcctcccaaagtgctggaattacaggtgtgagccaccatgcccagccaggaaactaaattttatatgttgctataccagctaatcattccaaagagaaactgggtaagcatacatagcaaatgctaatgtgagtcttaagtatctagaacacaagagccaaatgaaattgatatggcaaataaaaacatggagaaaataacccrcacataggctgtgctcagtggctcatgcctgtaatctcagcacttttgggggaggccaaggcatgcagatcacttgagtccaggagtttgagaccagcctgggcaacatagtaaaaccccatccctacaaaaaatacaaaaattagctaggcgtggtggtgcgtacctgtagtcccaacgacttgaaaagctgaggtgggaggatcacctgagcccaggaggtcgaggctgtggcagtgagctgaaattaagccactgcactccagcgtgggcaacagagtgagaccctgactcaaaaaaaaaaaaaagagaaagtgacccacatgttcacctcttaagaagccacagtaattctacattatcttaaggccaagaaaatatttctccggatggatggaaaccaaaagtagtgaagttgtacataatcttataagaaatgaacgtcattgtttttaagctttctgtattatctgctgacatgaaagtgaatcaagctataatagcctaagtcatttctgttttctttttttctttttccttttttttttttaaagtagagacgggattttaccatgttggccaggctggtctcgaactcctgacctcaagtgatctgcctcccttggcctcccaaagtgctgggattacaggcatgaaccaccgtgcccggccatggttttgtgggatgtttttttgagacaaggtctccctgtattacccagcctagtctcaaactcctgggctcaagggatcctcttcccttggcctcccaaagtgctgggattacaggcatgagccaccattcccagctagaagtcttagttttagaattttggggcttctagtatatgccgcaggggttatttattgacttcttaagaacactgttttcagggttgtttaaaacaaactttatgtatcttggtaacccagggttgatgaatagcaccaggaaataaatattctcagatgacttctgtcttgtagtatatactctggagcgaatcatcttttaagatttaagtagtggaagcaacacaatcttaaaattgcatttgctttagcacttgtacagaaattgataattttatttcctaaaatgaagacttaatagccaacagggtgccagcaatttcaagatttactcgggaataaaaagaataattcttaaacttgacagcaatttaaaggaagaaaactttcaatttaaaggaaggaaacttttacttcagacagttaacatgcagtactgagatttagtagcaggtataaactgcttttgaagcagttgagtaaaaggcagagttgtgaaatasatgagtggattcatataagaacctggattatgatcctagttctgcatgacattggactatgtacattaacctctgcagaattaggtaattggagtactgtttcaaggagctttcttgctctaaaaagtgtgatttagatagtatggccatgagtccatgtggacttttttttgcttttagaaagctgttggggttggaattgactggctttaaacatttagcaaacattaaatgctctttaacacaaaacagagtagtcagtctgctgtagagcagaggagttggcatactatctttgtgggttggttggttggttcgtttgtttatagacatgaggtctcactgtgtcactcaggctggtcttgaactcctggcctcaagtgatcctcctgccttagcctgtaatcccaggtctttgggaggcggaggcgggtggatcacaagatcaggagttcaagaccagcctggccaagatgrtgaaacccccgtctctactaaaaatacaaaaattagccgggtgcagtggcaggcacccgtaacccgtaatcccagctactcggtaggccgaggcaggagaattacttgaacccagggggcagaggttgcagtgagccaagatcgcgccactgcactccagcctgggggacagagcgagactccatctcaaaaaaaaaaaaaaaaaaaaaaaaaacgctgggattataagtgtgagctatagcgtccagctaatattttgggttttgtgggccacaacaatctctgtaccaaagtcttttgtaaaatatgaaaagagaattgtttaaaaaaaaaaaaaaaaaggtgttggctgggtgcagtggcttatccctgcaatcctagcattttgggaggccatggcaggaggatcacttgagcccaggagtttgagaccagcctgggcaacatattgagaccttgtctttacaaaaaaagttttaaaaacttgcatagtgaggctgggagccatggctcatgccagcactttgggaggctgagacgaggttcacttgagctcaggagtttgagaccagcctgggcaacatggaaagaccccgtctctaaaaaaataaaaaatgaaaatttgctgggcatgttgacgtgctcctgtagtccctgcttctcgggaggctgaggtgggaggatcagttgagcctgggaggtcagggctgcagtgagctcagatcgtgccagtatgctccagcctgggtgacagagtgagacagagtaaaactctgtctcccaaaaaaagttcggggggtggggagccttaagattttgcacactgcttagatcaatgtttctctaacttcatgtgtgcaggaattacctggggatgttgttaaaatgtatgttttgattggttcagtctgaaatggggcctgattattctgcatttctaataagctcccaggtcaataatttgagtagcaaggctctagagcagatcttaatcatttctagatcacagtccctttgagaattaatgaaatttatggactttcttccccaaaaacatatattgaaaatcttgtgtgcaacttcaggaggttcatttgtcctcctcctcagaaagtccacctcaggattctagctatttagttttgaaaactgaagtacaggccgggcatggtggctcatgcctgtaatcccagcaatttaggaggccaaggcaggcggatcatttgagcccaggagttcgagaccagcctggccaacactgtgaaatcccatcttcactaaaaatacaaaaatyacccgggtgtggtggtggatgcctgtaatcctagctacttgggtggctgaggcacgagaatcgcctaaacccaggagatggaagctgcaatgagcctagattgcacaactgcattccaccctgagggacagagcgagactctgttgcaaaaaaaaaaaaaaaagaaaacaaaacaaaaaagaaaaattgctttagttgttctgtaaatcctggaagctatacctctgtttccaaagccaaggtataaattattactctagaaaacggataagcagaagagcaaaatagtctaaaacaaaaatcagcatagagagtttttgagtttgagagcccctgagcactgtcagaatagctaagacattaagaactgtgagaaatgagagttctcctcaaccatcagaccatgataggccagttgatcttgaagcctgacctgatttcatggggctggcatttccttcctgatttcctgtaatcacctcctctctactccccatgattcagtggtagtcacagtaccaggaagtgccaaccttttcattcttgctactgagatgaagattttggaaaaaggagaagaaaccatgtggtttgggaaccacctttccttttttttttttttttttttttgatacggagtcgctctgtcgcccaggctggagtgcagtggaatgatctcggctcactgcaagctccgcctcctgggttcacgccattctcctgcctcagcctccccgttagctgtgactacaggcacccaccacaatgtccggctaattttttgtatattttagtagagatggggtttcaccatgttagccaggctggtctcaaactcctgacctcaagtgcttcatctgccttggcctcccaaagtgctgggattacaggtgtgagccaccgctgctggccatgggaaccacctttcctaagcattaacaccaaaccacctagatgggcagatttaactgtgaccaacttttatattaaaagataatggaacttttttttttttttttttttttgagacaaagtctcggctctgtcacccaggctggagagcagtggtgcaatcttggaccactggaacctctgcctcctgggttcaagcgattcttctgcctcagctttcccattagctggaattacaggtgtgcaccaccccacctggctattttgtattttttttttagtagagacggggtttcaccatgttggccaggctggtcttgaactcctgacctcaagagatccacccaccgtcagcctcccaaagtgttgggattacaggcatgagccactgtgcccggccgataatggaacttttgaaaaccaagggcttggtggccgggtacactggctcatgcctgtaatcccagcactttggaggccgaggcgggcagatcacctgaggtcaggagttcgagactagcctgaccaacatggagaaacgctgtctctactaaaaattcaaaattagctgggcatggtagcgcttgcctgtaatcccaactacttgggaggctgaggcaagagaatcacttgaacccaggaggcagagtttgtgctgagctgatatcgtgccattgcactccagcctgggcagcaagagtgaaactctgtctcaaaaaaagaaaaaaaaaaaaaaagtaaaacaaagggcttggcattatcagtgccagaaaaatacaagattgagagaatggggaaacaggagggacataaacttggtgggagtatacatttgtatgcaaaagtaaaagataacagacgaagatgttaaccctgtaacaccgtaaaaggaaatgttagaaataactagatagccataaaaatagaggatgattcatttagttcatggtatggttgtgaaatactgtggccttgaacaagtaccttttagtgtctcattttcctcatctataaacagggagggagtaaagataatagatccctccttagagttgtgaagattgaattagtaacctgtgaagctgttccagcagtacctggtctagaaataatagtctcaaaatttcattgcttattattactatacagccactttttaaaatgagacaggtatgtataaatataaaaggtctaatattgttttagtgaatgttgtacataaagagatgtccagaaaatccagaagatacactttttttttttttttttggaaatggagtctcgctctgtcgcccaggctggagtgcagtggcatgatctcagctcactgcaagctccgcctcctgggttcatgccattctcctgcctcagcctcccaagtagctgggaccacaggcacccgccaccatgcccggctaattttttgtatttttagtagagacggggtttcaccatgttagccaggatgatctcgttctcctgaccttgtgatccgcctgcctcagccttccagagtgctgggattacaggcgtgagccatcgcgcccggcaatatactgttaactgtatatatatctgttgaaagaggggaagaagaatggtgtttgaccttttaaacgtgcatttttcttttgtgataaaaatctctgttggtaggtaggctggagtactctaacattgcttagtgcatggttgcctttgcaacatctaatgaattggttacctttctacccccataactctagtaactggaaacttgcttaatgatcagtgtcattyttttagtcagttcattataaaatattccttatgagctaaaatatattttgtctgttgtgtatgttagcttttttaatttggagccacatagaaatctgatttatcaccagtttagatctgaaggggagcttatgaaaccttattttaggggatgagaagactaaaactcagagtttgtaacttatccaggagcatgtggcagtttgtggcagtactaggactgtcaaatgttagcagtatagcgtatcctaaaatttttatttttggccgggtgcggtggctcacgcctgtaatcccagcactttgggaggcctaggtgggtggatcacttgaggttgggagttcgagaccagcctggccaacgtggtgaaaccccatctctactaaaaatacaaaacttagccggccgcatcggcacacgcctgtagtcccaggtatttgggagggaggcaggagaattgcttgaacccaggaggcgggggttgcagtgagctgagatcacgccactgtgctccagcctgggtgacagagcaaacaaacaaaattagcttggtgtggtggtgggcacctgtaatcccagctactcgggaggctgaggcaggaaaatcgcctgaacctgggaggtggaggttacagtgagccgagatcatgccactgcactccagcctgggcaacaaagctagtctccatctcaaaaagtaaaataaaataaaatgtttatttccaagttagtcttagcatttgtttcaaacgctttaccatcttggtagttctctttggtacccagattgaatgcagttatgtaaatggagtctggttgtcrttctagacattttttgtcttctgacagtctatggaaatttctttggcagtcttaattactctaccagctaaaactrcagtctttcttaggtgttcttcccatccccccattcctaaatttctagacttttactggcatagattattttggttttagtctaaacgtagaatttaagcaactaccattattgaacctcatttagcttaaccaaagctgttatctctttggaccctgattttttattgtttctagcttcgtgatgttcttcaacttggtaattagaagtcttttgctacatgtatactaaaggaaatatgtgtgccaaatgctttattcattgacagatattttatttgacacccactgtgtgccaggtatagtggtagggctaggaaatcagtgatgtctgagtgactctgcctttatggagcttttggttttagtggggaagattcatgaagaccatgcgagtgtaaggaaaggacaggatgctctgtgggcacacagtgagggatgccagcctaatctgggagttagaggaaagccttactatttatgggagaagaaagggtatgtgaaggcccagaaacaagttagmggaactgaagagcatagtgtgtgatgctcagagggaggtgagagggtgacaggcaaacagcacttgggtcatggaggctgttataagcccgggttgggatgccaaagaagctgttgaaagattttaaaacaggaggagatcacgtttgccattttaaagacagtactgtctaagaaacagattgggagcaaaccacagtagtataatggggtattgtgtaatgttccttccctgttcaccgtgaggcctggaagtagtttaaagtagtcaagtagagcttctcaaatgaagaatttcattcagtctctgctaaactacaaaatttatgactcaaattggaaacacggtgaaaattttgagtcacagttaaatgtttaagtagtttaagataaatctgttatgccttgtgtttcctaggagccatttagattcaaaaacaacagtggcatttagaaggtaatttctggtcttaaatagtgtttttcttataaaagattttaataactggtgtttgccacaataaattaggtttttaaaatgcataatacaattgattaataaaaaggattttttaaaaaaataatgctgatttttggtttgtttgggttttttttgagatggagtctcactgtgtcacccaggctggagtgcagtggcgcaatctcagctcactgcaacctcagcctccaagtagctacaattataggcgcccgccaccatgccgggctaatttttatatttttagtagagacggagtttcaccatgttggccaggctggtctcaaactcctgacctcaaatgcttcgtccgccttggcctcccaaagtgctgggattacaggtgtgagccaccatgcccggcttgaataatggtagttttaaccatcagtatttatatttgacataagtggtacaaataatgtttcagtatcatggcttataaacgtttgcatggagttctaaaacgtggcaaactgataatttaatgaactcttacttgaactcttgtgcaagtatactgtgaggattttgttctgattggaaatctttattgtaatagcaaattaaagagctgtggattttcaagagctgaatttgaaaggtgtcagatgttaaatggaaggtaattcagagtttwttcttttattgtacctgcctccacccaaagagtcagagaaaaacatttggaagaaaaaattgcagagcatccctttggcaagagtaagaattttccactaccacttgccctaagagcattgacatgcctcaccagggaaatgttacaggatgtgatcatcggaacagcctagcctgctcttcatgcacaaaatcctttgtctgaaattcacagaagcctctccagacaaagggaaattgttgtgtcttcacttgaaaagtattcggtggacctttactttcatgaaccttttaactctaagaacctgttttcctaatagagtcaaccctaaattgactctgatatcaacaaaaggaatgtaacagtcacacagcaagttaaacaaaggttttcattaattgagcttccttagmgaaggctacttttacttcctagcctgagttcctgtgcataaaatgaagaggacattggttggtcaagatgatgtgatggtccctctagctaagaaaatactagaatatggcaggttcgttggtttgtttttgagatggagtctcgccctttcacccaggctggagtggcgcaacttcggctcactgcaacctccgcctccaaggctcaagcgatagtcttgctttagcctcccaagtagctgggattgcaggcacccaccaccacacccggctaatttttgtatttttagtagagatggggtttcatcatcttggccaggctggtcttgaactcctgacctcaggtgatctgcctgtctcagcttcccaaagttctgggattacaggcataagccaccgtgcccagtctatggcaggttttttggatttatgtttcttcaatatctttctacaaagatcagtttctaatagaagccaattaaacatagaaactctaaggtagcatatttcccaagtgttgggaggctttggagctttttagcttcgagttggtgtgcctgatagatgrgaaacagcacaacagaaaagctgttcataggatccatgactctagctattgcattttttctcttgcattaatttttctagtgtatttgtaaaacctttttaaaaatatggattcttaattttaaaattaacctggtgcaatggcacatgcccgtagtcctagttacttgggaggctgaggtgggaagatgacttgagcccaggagttcaaggctgtagttcaccgtgatcacgccagtatactccagcctgggtgacagagtgagaccctgtctgtaagaataaaaaatgaaaaaaaaaaaaaaaaaaaaaaagtggattcctagaccccactccaaatgcatttaatcatactcttaaagaatctgtaaaagatctccagataactcttcttgtcgtttctaaatatttaattgccacttgattagaatggargttgtaagatggaaacatttagaacagctgtggtcagtatttaagggtttcccaggcatttgacatttgttcctctagcatttgacatttaaggtattcctcagtatttggccaaaagttaaatgtgtatcaatacagtttctgcacagcaaagaaacacctttcatatattttagtagacctttataaagggaaagagtacatgttggtttccttataatgccagtataaatataatctttcatatacataatatatactatattatatattaatactatatataataaatctatactacacatattgtatatttatactataggaccaataggtaagacctatagtcctgtactacctgttggtcctgtaggtgtatctattagtgttaggtaggaccattactaaatacrgtgtgtatatatactaaatatgtatatttagtattggtcctacctaatactgttagataacgattggatatccctaatctgaaaagctcaaagatcagaaactttttgagcaccaacatgatgctcaagggaaatacttactggagcatttcagattttgagttttttgtgtagagatgttcaacagtaagaatataaatcaaacactccaaattttaattttaaaatactgtttccaagcattttgggtaagggatactcaacctgtaatatgttggcagtgttacccaggaaatttaaccttggtatttcttacctgaaaaatacattttctatttatttcaaatcctctgagcttccactgaaacacagcaaaacacatgccaaaacattgcttttgtatcctcttgtaggttgkactcaatttaaatattagatttgttgaccttttaaaatwtgtcaagtatatgagagtatgagctagggtttatatatwgaattgtttaagtctgttcagcagttacaatgcagaagtaaaatagtgcttatagattgacgaccgctatctcacattggacagaagtcttctactccataggatcatgacattgacgtaaatcaaatcctcagacaccaaaggaacatttggaaataaattttccatttagggtcataatattcatcattgaacttgtcctctttttgaaatgttcgagggcatgtaggatcaggttaatcatgacaggcagaaatagtgcagtatagrgcatgttagctgttaaagaccactaaagtttagaatatagttactttgttgtcttaaatcatctgttagatgtactctcttcaatgtagttagagcagaattatattaaaatgaaaggttctcgttgattcagtctgaatattgctgttcattgcacaagcatttccagcaggaatttcaccttagcttgtgtgtccctgcagtcaaatgcaagggtgatctttgcctgttgagattatatattgacaaactgtgccgccttgtgaccacattgcttacttaggctatagcattgtttttatgcactcaaattaaaaaagtaaaccatattctccctgaacttaagctccgaagtagagaaaaatcagaactaatttgaaggtttaagaagttcagtgttggctgggtgcagtggctcacgcctgtaatctcagcattttgggaggcaaggcaggtggatgcctgaggtcaggagtttgagatcagtctggctaacatagtgaaacgctatctctactaaaaatacaaaaatgaggctggttgtggtggcgcacgcctgtagtcccggttgatcaggaggctgaggcaggggaatcgcttgaacccgggaggtggaggttgcagtgagctgagatcatgccactgcactccagtctgggtgatagagcaagactctgtctctgaaaagaaaataaaaaataagaaattcaatgtttacttcttggacaggagtgctattttgccattttgtatatgactggtaacatgcaattcagtatagagagtaagtctgaaaaatgatttgattttaaaatgccatctgcaagtatgggagaattttcttatgtaatttgtagctgccctttcgtaagacttacaaaccaccttaattatctttcagaaaatcacggacagctgttttgttgttattattgttgttttgagacaaagtctcgctctgtctccaaagctggaatgtagtggtgtgaactcggctcactgcaaccgtctgagtagctgagactacaggcacactaccattcctcccagctaattttttatatttttagtagagacaggttttcgccatgttggccagactggtctcgaactcctagcttcgagtgatcctcccgcctcagcctcccaaagtgttgggattaacggacagctgttttaatgtccagctgctttgtgtgattgtgccactcattcagcagtatttgaataccagcagagggctgggcactattctcaaggtgcatggctttgtctgttacttgggctatgttgtggaatttcactttgtacacacatcaaggaaaggggctgagatttgggccttttaagagctattaaagtaacttgttggcctaggaaagaagactcagttgacttaaagatcttcaggttatgcaagaggtttattattcatttaattgatatttctttttttttttatgagacggagtctcgctctgccgcccaggctggagtgcagtggcgcgatctcagctcactgcaagctccgcctcccgggttcacgccattctcctgcctcagcctcccattaattgatatttcaaaaagtatcaaaggatatatgccccagctgtgcagtgttactagtttgctacaccttcccagaggtgtttctttataccattggaagttgtcattttagtatgaattaattacatgttatacgagcatatcaaagggtttgaaacagtgaaagagctaagattaacttggaaataaacattttattttattttactttttgagatggagactagctttgtttcccaggtggtgtgcacctgtagtccttctgcttgggaagctgaagtgggaggtcaagggtgcagtgagctgtgattgcctcactgatctctacatcctgggtgacagagcaaggccctgtctcaaaaaaaaaaagtggtgttactgtgtagttttattttgcatttgccatgtgtttcgttaattgaatatctttttaaagggggccatttgcttcctgttcacaataatttagcttttttgatggaatgaatcatggcatatacaactttattctctttgctgtgccttgtgtatatgtagtaagacttttacttactgctaagtaggaaagtattctttaaagtgaaagcttgaaggcctgtctgaagatacagagcaaaatttcttagaataatgtagttaggtttccttaagcctcattctcttccttcctaattcaaatcttgaatccatctaaagttttttatgactccaagataggttgatcactttgcttgttttaactgaattttatgtatttgtgttatatgcagatcatttattttctttaaaaattgatttggagacaaattcatctttagataacatagttttaaaagttgctcatttcagccgccttttttttctcctaattagttggtgacaaagttcctgctgatataaggttaacttccatcaaatctaccacactaagagttgaccagtcaattctcacaggtaaatatgatatattaagtcattgaatttctgaagaccttcgcatattccatgccaatagagttggctcttgcctcactgtccctttatggtatcccatcttaatcctctctaagatacttatttcttagtgctttagtctcgctccattgcccaggctggagtgcagtggcgtgattgcggctcactgcagcctccgcctctcaggttcaggcagttctcctgtctcagcctcccaagtagctgggactacaggctcctgccaccatgcccagctaatttttgtatttttattagagatggggttttaccttgttggtcaggctggtcttgaactcctgacctcaggtaatccacctgcctcggcctcccaaagtgctgggattacaggcgtgaaccactgcacctggctgccgatacggttttaaaggcatgatttaaaaacaaaacaaaatggctgggcacggtggctcatgcatgtaattccaacactttgggagactgaggcgggcagatggcttgagcccaggagttaaagacgggcctgggcaacatggcaaaaccccgtatctacaaaaaatacaaaaattagccaggcctgtaatcccagctactcaggaggctgggtgaaaagatcacttgtgcctaggtcaaggctacagtgagccatgcttgtgcctctgcactccagcctgggggacagagcaagactctgtctccaaaaaaaagttgtaatttgttcgttaccataggtaaatcttaaggttgaattgttgtctgttttgtggaaagcaaattacttattcgatgtcctttttccaggcaagaaaaatagactccagtgctgtaatttttttcactggaggagtgctaatgttgtatcaatctttacagtatccaaatacacaatgaacaaaagttagcccccataagagatgaaaattgtactacctggaatttgcacaattgtttgaaacattttcccgtttttstgtgataaaagcacaatctagggtggagggttcatactaactggaagtaagtttgtcagaagaattaactttaaatacaatgctaacttggattaaatagtaaacataaagtctaaaggctctcaagatttatctgattatcaattttgaaaagcagctaatgtcatggagacagttatatgagtaacctggctctattttttttggtattgtttctttataaatagcttacttattaaaattctcattagcaacaacaagctggaggccaattaagccataaaatgttggagaaatggttgggttatatgtgtgaaattctcatagtgtgccctaaagacgtagttgccatttaaaaaaaatttttttttttttgaggcggagtctcgctctgttgcccaggctatagtgtagtgctgtgatctcagctcactgcaacctctgcctcctggattcaagctgttctcctgcctcagccacctgagtgtctgggattataggcgtgcgccaccatgcccagcttatttttgtatttttagtagagacggggtttcactgtgttggtcaggctggtctcgaactcctgatctcatgatccgcctgccttggcctcccaaagtgctgggattacaggcatttaaaaactttttaggctggtcacggtggctcatgcctgtaatttcaggactttgggaggctgcggcagtaggatcacttgtggccaagagtttgagagagcagttatagtctctataatgaaaatctttttttttttttttttaaagacagagttgcactctgtggcccagtggcgcgatctcagctcagtgcagcctctgcttccggggttcaagtaattctcatgcctcagcctccctagtagctgaaattacaggcatgcaccaccacacctggctaattgtatttttagtagagatagggttttgccatgttgtccaggctggtcttgacctcctgacctgaagtgatcgcccgcctcaaacccccaaagtgctgggattacagacataagtcatcacacccagcctataataaaaaactttaaaagtttaaaaaaaaatttaaacttcatagaggttctcgaatattatctttctttcattaagaaatcataatgtagtttttggctaacttgtggaaccaatttttttggtcaaatattgagagtgaagtttgctacctgtaacttaaagtaacatttagagacatattttactcagattgaccctaattatatatctatgacatgatttttaaattgaaatcagctgggcatggtgtctcatgcctgtaatcccagcactttgggaggccgaggtggggggatcacctcaggtcaggagtttgagaccagccttggccaacatagcaaaacctgtctctactaaaaatacaaaaattagctgggcatggtggcacatgcctgtaatcccagctacttgggaggctgaggctggaaaattgcccgggaggcagaggtttcagtaagccaagattgtgccactggactccagcctgggcaacaaagcaagactccgtctcaaaaaaaaaaaaaaagtagttctttatttaccatgcgatctttccagtacacttgctaattgctactccagagcatagccagatgtggcccacacctgtaattccagcactttgaggaggacaagatgagcaaattgtttgagtccacgagttggagaccaccctgggcaacatggtaaaacctcatctctacaaaaaaataccaaaaaaattaacccggcgtggtattgggtgcctgtaatcccagctattcaggaagccaagttgggaagattgcttgagcccaggaagttgaggctgtagtgagttgtgatggtgccattgcaccagcccgggtgatagagcaagacctctgtctcgaaaaaaaaaaaaagtatcagtatatatgttaaagtatttattaaagtatacaacaaatatatgtaaataatacagtcacagtatcagagtataaaatgattactgaaaaataaattaatttgaatagttactccagaaaataatcaatggggattctacttgaaaattcacttttttattttggaattgtgttgatttttatcctgacaccctttgttctggtattaatttccattactaagttttcccagcttacctcctttgaatgaattgggccttttgccaaccttttctcacactaacagtatcccaagagtggtaatgggtgggcatgaatgagaggttctaggttcttggtgtgggtcgcagagatctgttttttctgtctcacaacccgcttaggtgaatctgtctytgtcatcaagcacactgatcccgtccctgacccacgagctgtcaaccaagataaaaagaacatgctgttttctgtaagtactttatgaaatgtgtttttatttacagacatttccaaagcctaatcaaatgttatgtttttcactgccaaccatcactggctatcattctaaaggataatcacacttttcatggtcagtcttaggtgtcagaatatggcagtaacataacgtgtgacttagatgtcttttaattggcaagttttgggggaccaaaaaataatgactagcttatacatcttcaaactcttacctgcaaacatagttgaaaagtagatttgtttggaaaagccttagccaataaagggtattttcaaaatgatgtagatgacagctgctatttgtatgtggttcacaataaaaaggtgcgtgtttagagagagagagaaagcaaacatggcaaaccattaataatggtgagtctaggtgcaaagtatatgaatgttcattttactatttcactttttctattgatgtgaaaaattctttgaatagtgaggaaatgattttaagttggggacatttgtgggtttgtatgagaacctgactactacccatagtaagtaaatagaggtaccctgaaaatagtgaagccatgtccttctcttataacactaggaattaaagtggcatgggagagactgctcacatttgatttctttggtttttggaccctgtcacatgagtaggggttgtcaagatagcccatggggctagttgccgtttctattacagtgagaaaagtaggggccttgagttgttggagccagaagtggagaatgcttagagttgaactatatgagtttgaaaaattgggaacacagaggggttaagagcactgcttgaagatggtctgcaagccgggctcaaatagaaatctaggtgggtcagtacagagctgcctgacataagtaagtagcacatggagcattgcttgttgtcacagttgtatggctggttgcttgaacagtagccagtggaagacctagtagaatgtgtagagaatctgggtgccctagtcaaaaaccagcgtcggtatttaagttgggatgtggtattcatcttgtgaccagttctctacttctgtcctaggrtacaaacattgctgctgggaaagctatgggagtggtggtagcaactggagttaacaccgaaattggcaagatccgggatgaaatggtggcaacagaacaggagagaacaccccttcagcaaaaactagatgaatttggggaacagctttccaaagtcatctcccttatttkcattgcagtctggatcrtaaatattgggcacttcaatgacccggttcatggagggtcctggatcagaggtgctatttactactttaaaattgcagtggccctggctgtagcagccattcctgaaggtctgcctgcagtcatcaccaccygcctggctyttggaactcgcagaatggcaaagaaaaatgccattgttcgaagcctcccgtctgyggaaacccttggttrtacttctgttayctgctcagacaagactggtacacttacaacaaaccagatgtcagtctgmagggtaagaggagtaatttagaatattccgtgtcgtggttctttgttcatcctaccaatatgccttcatgccatcaaaacttttgatttgtaatttcatacatttctgtgggctgtatgtatagcctgagcttaatttctaatatttgagaggatctaatcatttaattcctaaaactttcacaaaatacaggatatctgtatggctgatatacttgtattagatgtaagagaattagagaaattatattttcctttaattaaaaaaaaaaaaagcctgggcgcagtggctcacgcctgtaatcccagcactttgagaggccgaggcgggtggatcacctgaggtccgaagtttgagaccaacctgaccaaaatggtgaaaccctgtctctaccgaaaagacaaaaattagctgagtggtggcgtgcacctgtagtcccagctactcgagaggctgagacaggagaattgcttgaacctgggcagcggaggttgcagtgagccaagatcacaccactgctctcaattctgggcgacaagcaagactccatctcaaagaaaagaaaagaaaaaagacaaggtctcattctgttgcccaggctagtgtgcagtgacacagctgtggctcacttacagcctcaacctcccaggctcaagtcctcccaccccagcctcacaagtagctgcaaccacaagtgcatgccaccatgccccactagtttttttatttttttttgtagaggcaggttctcactatgtcaccaggctggtcttgaattcctgggctcaagtgatcctcctgccttggcctcccaaagagctgggattataagcatgaaccaccacactcagcctcctttctaattttcctgatcctctgtctctaggtgtatgttaatagacaagttctagagaaagctgctagttaacctccctacctgaagtcctaattggtttttctatcacatgttgaatgaagcgtgctttttctcaaaaagtagatagtcatctctctgtattcattagagattggttccaggacctccctcagataccaaactctgcagatgctcaagtctctgaaatgaaatggttcagtacttgcatataaccttgttcatcctccagtatacttgaaaacatctccagattacttacagtacctaacgtaatattataaatgatatgtaaatagttaaactgtgttgtttagggatagttaacctgtgttgtttagggaataatgacaagaaaaaaatgtacatgttcagtacagatgcagttattttttccatctgctgtttagttgaccgtggatgtggaacccacaggtacagagggctgactaaaattgcttttaacttgctttattctgtgtattcatcatatatatttttgtttgtttgtttgttcttgttttgagatggagtttcactcttgttgcccaggctgtagtgcaatggcccgatctcagctcactacaacctccgccttctgggttcaagcaattctcctgcttcagcctcccaagtagctgggattacaggcatgcgcccccacgcccggctaattttttgtatttttagtagagatagggtttctccatgttggtcaggctggtctcgaactcgcgacctcaagtgatccacccgcttttgaaagcctcccaaagtgctgggattataggcgtgagcccccgcgcccggccatcctatattttttgaccatcatttgataaaataaataatttaaacctgctgttagaaaagtaacaactgaataaataatgcaataattatacagctggattattttgtataattcactttccttaggttttgcttaaacaacttggtacaagtctattccaaaaggtacacatgactcatacagagtagacatttgtcacatattttattcggctcattaattagcaagggaatctgtatttgaggaagtgttcaatattagaatattagaatagggattgctaggttagattacaaaactaatgtcttacagggaaacctcatataacatgagcatttatttagtaacacagtgttacattttcctagaatgggcttgttaaataatgcttctgtatgatattgaaagggtgtagttatcttggcctttttgtcaggttttagataattatttttaacatcggaaattgttttataatcagttaagccctgtgaatttttatcttgccaattttaagctcatgatgattttttagatacaggttctccctcccccgcaagctccttgtgaagtccaaacccacatttagaattgacagaactggggtgttccaactttcaaagtggaaagcttctaggtttgtcttaggtttctccaggatattaaggtgtttgagctacttaagttcttattttttgsaaccaaaaggttggatgaattggctaaaagtcagttttgtcatactggttgtttsaggaagagaaagggaattttcttatttacgattttgtgtctcacttagcctgaaagctttaattcctcagaatagtctttatgtctgtgaaagtaagccatgtgtaaagccatgtgtaaaattgtaatttttaaaatttcagtttcccagttcactataatttttttttgttcttttctcccttgaatggcttggcttaaaatgttttcttataataaagaaaaagcctgcctgttctgagtgaagctctacctcacaacaggaagctggtgctaattggtattctgcaggaggcttcttgcagtggtattgcataactgcccttgacttaggaagattttcatcctgcatatcctaaatggttgacttgctcacagtcaaaaatgtctaagtacatttagatttagctaatgtagattcagattctgaatgtcttttagaatattttgggctttggtatagactcaaagaatttcacatttttggctgggcacagtggttcacgcctgttatttcagcactttgggaggccgaggcgggcggatcacctgaggtcaggagttcgagaccagcctgactaacatggtgaaacctcgtctctactaatattacaaaaattagctgggcatgttggcaggcgcctataatttctttgggaggctgaggcaggagaatcacttgaacccgggaggcggaggttgcagtgagccgagtcgtgccattgcagtccacccagcctaggcgacagagtgaaactccacctcaaaaaaaaaaaaaagttattttaaaataaagattaactaatttccttattgaatgtgagatgaattgctctgaaaagatgtgtttttaaaacacaacatagctttgttgttgctgttattacggagttttgctctgtcgcccaggctagagtgcagtggcgcaatctcagcccactgcaacctctgcctcccgggttcaagcacttctctccctcaacctcctgagtagctgggattacaggtgcccaccaccacgcccggctaatttgttatatttttagtagagacgggtttcaccatctttgccaggctgatcttgagctcctgtcctcatgatctactcaccttggcctctcagtgctgggattataggcgtgagccaccgtgcccagctcaacgtggcctgtttaacttgarttttacattttttaaattccccttagagaatgatttgatcagattattaattgctcatatttcagagaaagcacgagaaaatatagttttgacatcactttctgtaattttttctttttagaggaggttttacaagttttcatttgcaatgaaaacacaagcctaaatcttacttttccaaactgggcttctgaattataatttgtgaatgcaaatcaagcagtggaaaaattatctttaagaaaatagcttatgtcgctttaaaaaataaaattaatcctttcctaagcatgcttccatctgtattgtctagggaacatcaattcattcagctctgcgggctccttactgtatacatatagttatgcagcttcatagaacatgagctattgccacaataaaaawaagtgggaaggagcagagaagcagtttgtcttattttactcgggaaatgtttatgcaactctgaaatgtgagtttattcttcccaagcttttgtgcttagctctaaggcaggactacctaataccactctcacagccagccatttgaaatttgggattctgagcaatctaaagagtaacttgtctctggaactgaccttttgctgaccgggagtcctcataacttggattttgtgtgggttgttgtgtctttggtgccactgctgctcattcattcagcacctcagtgatgctgtttttcatactgttcgattggtcgggggtgtgatgggcgaagcagtctaatataattaagctagttagggtaagggacagtactgctgatgctgagtgagcctcagtgagttttattaaagttgttttcgtaaatgaaagaggttgtttgcctttgtcctaagctaacaaaggtagtttatttgtgtagcattttttaaaaatcccttttaaatactctgatgcgctctccccctacagatgttcattctggacagagtggaaggtgatacttgttcccttaatgagtttaccataactggatcaacttatgcacctattggagaagtgtgagtaaccctcctcctcatttaaaggatctggtgtggcagtttagtatttgtattgatttgcagcatgtctacaaagttaagacagctttctgaatgtggctcaagtcaacacttattactaaagtagtaaatgtttttaaaacaaaaactttgaaagatgaaccaaaggttataatccagtcatctttttgcatcttctgggctccaaactttcaagagggatttgtgtttgttattcactgtagccagtggtggaagaattgaattaagaatttctggtctttttactgattgatttctgataccagagatgcattctctcttttgtttttgtctaatattggctctggcatcaaattgtttggaattttttccagtatgttgtcccagaaattctgttttcattattaaacaattgcgggggggcagggggcgggaggaatcaatagtggcgaccataccctgctctaagagtgttttctctttgggcaggcataaagatgataaaccagtgaattgtcaccagtatgatggtctggtagrattagcaacaatttgtgctctttgtaatgactctgctttggattacaatgaggtaagtctcttcataaattagaaggaatggctgttcctagttcaagggtggggtgggtggaatgaaagtctagcctgccttcctcccttttgaaagtcaagggtgcctgattttgtttcccccttccattcagaacctgatggtggggccagcatgacctcaccaaagaaagctgagagcctttcacatatcctctgtgactgagcattgcagttagttaacttaaagttgtagtatatgtgatgttctttctgttgatagcatacttactataaatgaataaaacccaggatagaaaatgctttcctgaaagcaaaggatatagtttctgtctcaaaggtaagctagtccctgtcagagacagaatgtgaactcttcagaatgataagcagtgacatggaattacattattatgtgaaggcactctttgaattaatagtgtgatcagtggcttcttatatttgggtgaaataataaatactgtgtttgatgtcatcttatatttaagggaaatgaaaaacctacttattagaataagatcacatgcacacctgtactttgagtatgtttttaattatctgggtcacctgtttcagaggaggataaaaatggccttacagtgttgtaatagaggacagattgtgcttttgtggaaaaaaaatattaaagataaatttatctgtgtacttctcccttttttctactttctgtgcctttaaccaatacaggcaaagggtgtgtatgaaaaagttggagaagctacagagactgctctcacttgcctagtagagaagatgaatgtatttgataccgaattgaagggtctttctaaaatagaacgtgcaaatgcctgcaactcagtgagtatttgaacctggtttattgttcatgctgcttatcagtcgtactatatatacttagtgtctgcactgtcctactctcttagaaaactaattataccttatctcctcaaacttacagtatttccttccccatattcactctcaggtaagatgctcttcctgtgtatttgaccaggaaaataaaagcaatcaatagctaatttccttgagcgaccctctgggcccacaggggctgccttctcccatagtgctgtgaacagtgttcttgctcctagcagaagccacctcctcccaacatctttgctgcattattgatttccatctctactagatgttcttcagcatagggggaaataatagtgtctttctatcttgaaactttcctttgaccttatttcccctgtcagctaccacactttcttttcctgttcaattaaacctttttttttttttttttttttgagacagagtttctctctgtcaccagattggagtgccatggcgcgatcttggctcactgcaacctccacctcccaggttcaagcgattctcctgccttagcctccctagtagctgggattacaggcacacgccaccacgcctggctaattttttgtatttttcgtagaaaggggtttcaccatgctagccaggctggtctcgaactcctgacctcaggtgatccgcccacctcggcctcccaaagtgctgggattacaggcatgagccaccgcgcctgggcatcaaacatttcttaactcatttgatgagaccagcataaccaaataccaaaggtcaatgtggtgatggtggtggcagtggcagtggcagtggcagagggcacccacattgttcatgtatacactgaacaaataagtggcctctgagcctttttctgcctgtcagagtctttgagacagggctcattcgaccagcatcactatgacaagggccagtagcaaggatggggagtctccacagtgagttggacctgagtgaggttcctctcaaagagctgctgctccctcctgccaagaccaccatactggacctgtcctgcagtactgcccttagatttctgtggcctcacaagcccggggagcctagacctcagtagaaacactttgcaacggctgctggtgaagaatggccatccattgagtctctagcacctgggtctcctcaaaagactggtccccctgcctgtcacttggctcagcttaagaacttgaagtggaccaggcgcagtggctcacacctgtaatcccaacactttgggaagctgaggcgggagagtcacttgaggcctagagtttaggttgcagcatcactgcacttgagcctgggcaacagagtcagaccccatctcaaaaaaaaattaaggcctgaagtggctaaacttgaaggataactccctttatcttatcctggccaaagtggtagatgattgcttggatgagaagtgatatgcagataagatgttgcaatacacaaagtctgtgtgggtcagtcggtcacgtgggtgccaaggacaggtgggagagaagaagcaagctacagaagcagctcaagaatgggaactgcggaagctgattgtmttggaggaaggagtgtgatgctctcagagcagccagggaggagcagaaggagcttagggacgtaagtcaggctctcaaagtctatgtctggttcctgcccccacaaaccaccacccaggaaacatcattcctgagctgtgtggcagcagcagcagctgctccttttatatggcagacagggtgattgcttgttgggcaagagccctcctacactatcttagagtgaataccctctatctgcagtccagggtctgcacagccacatggtcctctaataggtccaccagaccatttgcctgcaaacagcctcatcctcagtgcccactgtctcctagctgtggagcttggattcctatggaattgggttctgctgaacatacctctttttagcatcagacctacctgtctgtcatcaccatggggctgccagtcagtacttttgcagcctctttataggacattgttgtaacttagggttccctggtagaataaggagcgatgggaaggggagaggttctgcctgcctgaaggaacaggtctgggggaggagagaggtaaaactcagccttttctagttgtcatacacagctgtataaaggcaagcctcatttagcaaaatgattagttgtcaccacgtttaatgctttttgtatgtcataagccctttcatcccttcctggataataagggcaaatgaggaggcattgtgtcattggggggtagtacagcctgagttgggagggagcagtatacctgttttcttaataacctcaaatatcaggcattttagtgaccacacaaaatctcagggtgaaaagttctagaccatcatgtccagcctgcagttagggacacctagcccttccatgacctgtatggcgtggtcttccggttagtgtgagrcagcattttgtctcctttatactgtcctgagaaaacaaaactcacactggaattgagactgtctcagctgaaatatagattccttttcagtaaactgatgcacaattcacaaatagcagtctcaaagccatgaaggccttggaccactcctttggcttcttccctctacccatgtgtcttccatgaacccgaagcagtccaggcttattcactctgccagtaagcaaggagttggatcctggcagagccacgctgcctgtgatctattagttggtgtaactaaaaatctgaggcagcctgaaaacagcttcacagattgagggtttgagtcgtttgattctagacctctgactactccactgagtgatgggaaacaagtcatgtaatggggctgaaccagcactggctcactagccagtgaccacacaagtacgggcaatactgtcatccttgtgtctccctgctccagagctcccttgtcccatctttttcacatcccttggccaagggatcggaaacagctgtcatgctgctcattcactaaggagttccaaacacaagctctttgcctcccttcccacttgagacagcaggaacccatgtgtagtttagaagcagagagagcaggtccagcattttggccccatggcttgtttggtgaggtctgtggttcttggccagcctagtactgaaagggatttccctcccccactcccagcccaagacctcttacctgggtaggtccacgccttcctcagaatcattgcgtgttcctttagtcatcccagtgccattggcgcaaatgcttaattgaaactaaacacacgtgtgattgagatgatacagaatctagcgtagcactcatacccattcctttgctgcctgagacggttcagtggctggcaggccagcaggatcgctgcagggccctgagccccatctagtcagttcatcagccttcagtcctcycgtagcttcctaggttagatgctgatgttcttggggatttctatgatgatttttaaatgtgtgtcagtgggagcaaatataattaactcaccacattaaccaaattaaggtggaaaaaacaataaggtcacctcagtaggtgcatatgatgaaacgcatcttatcacaccaaactaagactataaaagtgtgtctttaacgctgacagtgtgtttacacagagaccatgctaacataacagaattctcaccatttctatgcagtattatactggcattcctggtctgtgtaataggcaagaaaagtacaaaaactggaagagaaggggtatctttagttgtaggtaacgatatmaagccaaaggtttattctcagtcttcgtcttcctattttgttggtgctgtcactcgctccctctttgaagcacctcttcacttggcttccacgatcccatacttgctctccctccctggcctctcattcgaggtctttgtagctgggtctttcacaaggcaccaggaggtgaaggctccatagtcctcagccatttctgtctatagttactcccatgatctcttctggtctcattactataatcagtagccactagctatctaaaactacttagaatacctaaaaacacttccttagatgccctagccatattcacttaaagtgcttatccatcacgtgtgacagccacatgaacagtggccacagagcattgccatctttcacagagttctggtggacagctctgcttggggccatctcttcacctccaacgttccctagtttaagtcagtgtcattatactgaatggtattccttgtctcccttcagccaatgcttttgttttttgagatggagtttgctctttcgtccagggtggagtgaagtggcgcaatctcatctcactggaatctctgcccccctggctttaagcagttctcctgcctcggcctcctgagtagctgggattacaggtgcctgccaccacacctagctaatttttgtagacagggtttcaccatgttggccaggctggtcatgaactgctgacctcaggtgatccactgcacccgaccaccttcagccaattcttgacaactggagcttgagaccctccgttgtcttctgttttacttgtcttaaaagccaaatgccccataatgacttttgaggtcttaatgacctgcttctaccatcctctgccattacctgcctcaccttttgctcatgtaaactctattccagccacgttggcactcctttaccattccaggacttgccaggttgcacttccgttctctgcctggtgggtcttcaccaccacccactgggttcacacacatcttttcaggccccatggggccatctttattcaaatgtcaccgccttctggccactttatgtaacagttcatatgtatgtatgcaaattttctatcccccttccctttttctctatagcacttgtgttacttttgcatcttagtctgtctctcccaaaataggggacaagtttcatgagggcaaaaacctgtctgttttgtttattgctatattcctagcatctgtcatgtaataggtgtgcttactgcttgttaggtaaaaaagttcagaaattgccacccagtagtatccatatttgttccctttgtaggtcattaaacagctgatgaaaaaggaattcactctagagttttcacgtgacagaaagtcaatgtyggtttactgtacaccaaataaaccaagcaggacatcaatgagcaagatgtttgtgaaggcaagtatggcagattgcaattgagatgttcttgccagggttaagatcccggtgaaccaataaaacaaaattgtttatctaaatctgtaacatttccagggtgctcctgaaggtgtcattgacaggtgcacccacattygagttggaagtactaaggttcctatgacctctggagtcaaacagaagatcatgtctgtcattcgagagtrgggtagtggcagcgacacactgcgaygcctggccctggccactcatgacaacccactgagaagagaagaaatgcaccttgaggactctgccaactttattaaatatgaggttagctaatgaaaagtttctttgtccacaccctgcacgattcattgtgtttaaacagtaytccttcaagcaaaaggtcaaacagttctcacttttgccaagaaagaggtgtggttatttgtttttctgcctgccagctgtgtcacccttaaaatttgctgcttcaaacatacatagttaataatttcataaaagtgttattttcaaagtagaatattttcaaagtagaataatcaagatgagcttaagcttgtaaaccccattttgcctctcatctaaatcatgattttttttaaattggtgacatttctagaatattcattagttactgaaggtcaaaagatccaagttggagattacttccacttttctactcagagtagaattcttttatatcaaggatgtgacatcctaaagctrtgaacaaaatgaagaagctttggtactgtgggctcagaatagcacaagagttaaagaatggtttgataacgggtgtagtggtatttttttttctcataagaaaatgcaaaaaccgccaggcacggtggctcaaatgcctgtaatctcagcactttgggaggccgaggctggcagatcacctggggttgggggtttgagaccagcctgaccaacatggagaaaccacatctctactaaaaatacaaaattagccaggtgtggtggcgcatacctgtagtcccagctaccctggaggctgaggcagaagagtctcttgaacctgggaggcggaggtcgcagtgagctgagattgcgccatggcactccagcctgggcaacaagagcgaaactccgcctcaaaaaaaaaaaaagaaaaaaaatgcagaaacctgtctcaatgtttaactgggcatttttcaaactaggggacaaaaactagaacttgccacttttatttaaagtgatgctcttattttagaccaatctgaccttcgttggctgcgtgggcatgctggatcctccgagaatcgaggtggcctcctccgtgaagctgtgmcggcaagcaggcatccgggtcatcatgatcactggggacaacaagggcactgctgtggccatctgtcgccgcatcggcatcttcgggcaggatgaggacgtgacgtcaaaagctttcacaggccgggagtttgatgaactcaacccctccgcccagcgagaygcctgcctgaacgcccgctgttytgctygagttgaacyctcccacrrgtctaaaatcgtagaatttcttcagtcttttgatkagattacagctatggtgagcatgtttgaacatgtacaggtgactcaggctacacaagcacatagtagcctctaatyttgaccactgaatttttttgtcatagctccctaatttggaatttgtcatgatttgggtcttttctctagaattcggtgaatcagtggttagcatgttgtgtgctacttgcagggaagatcctagagtcgtttaaaacccagaagggccttccagatcagtcccagaggaacartctggtgatctagtctcttttttaaatgagacgtgtttttattgtaagttttctgaaaattgaggatgtaatcagtcagttgtttggatcaccctgcttttaagttctttaagagctggctattgatgaagcatttccagtattcttcccctcacctgattttcacccagatacattatgttaaatttactttcttctcttttaaaaaaaaatcttagttttgaaacatactataagtgtactctcctctcccccagaggtaactgaagttggaatttagcaaaaatattaaaaacatgggagtgctgtttttgtgtctgtagacagtattatttttgcatgcttttgaaggcatattttttggccgagtgcagtggctcatgcctgtaaccccaacacttgggaggccgaggcaggtgaatcacttggggtcaggagttcaagaccagcctggccaacatggtgaaaccccgtctgtactaaaaatacaaaaaattgctgggtgtggtggtgggcgcctgtaatcccagctactcgggagattgaggcaggagaatcgcttgaacccaggaggcgtgcagtgagccgagactgcgccactgcactacagcctgggcgacagagcgggactccatctcagaaaaataaaaatttgcatatttttgcaatctgcatctttctacttgaaatttatccatgtggatacaagtgcttcctcttgactgccacataggttgtgtttttgtttttagtaagataatacagataaatttgaagtcccctttgtcccacttcggtaaacttatttggtaattttacatttcctaggtaaaatgtgttttgtgacaccaacttatgaaacaaaaattctaaaactctttgccaagagacctacggctctattcattttcctcctgcttcccattcagtgggcttttgcctaggggtatgaatgtggcatgccagttggctgacccaaccattgctttccctttcagactggcratggcgtgaacgatgctcctgctctgaagaaagccgagattggcattgctatrggctctggcactgcggtggctaaaaccgcctctgagatggtcctggcggatgacaacttctccaccattgtggctgmcgttgaggagrggcrggcaatctacaacaacatgaaacagttcatccgctacctcatctcgtccarcgtcvgggaagttgtctggtaggtctctgtgacagcatcacttactgtacgcctttatctaaatgggtcatggagcccagttctcgcagtttgctctccakattgcagcagctttggtctttgtgcctgagttggaagaggggagtgggcaagacagaaatgccttatggaagcagtggtgctttggccctcrggagggttgtctgcagctgccccaatgtgcaaagaatcctctttaacgtgagactgagctaacattaaccaggtagtcacatgaaattcttgccctccaaaagttggctttwtctcagtcagcttaataatttttttatttttatttatttttttgagacagtctcgctgtcgcccaggcttcgggcagtggcacgatctcagctcactgtcccctccacctcctgggttcaagcctcccgaacagctgggattacaggcatgcgccaccactccctgccatttttttgtgttttagtagaaatgaggtttcaccatgttgcccaggctggtctcttaactgctgagctcagccagtctgcccaccttggcttcccaaagtgctgggattacaggcataagccaccgcacctggcctcagtcatctgaatttaagtaataaactaagtaaaattgagctttaattcaaaattgggtrtaagtattttacagattacctgaagttgttgtcatttatttttctggaggagggcgggttgatgatgctctttaaatagtggccagaagtcatttgggctctctttgtcttcttttcttgattggaaacagtattttcctgacagcagcccttggatttcccgaggctttgattcctgttyagctgctctgggtcaatctggtgacagatggcctgcctrccactgcactgsggttcawccctcctgatctggacatcatgaataaacctccccggaacccaaaggaaccattgatcagcgggtggctctttttccgttacttgsctattggctgtgagtacaatttttttatattactgatttttaaacaaaatgtttgtgagctgaaattttgtaaattcatcccttaaaagcgtgttttttcttctatccccgtatagggtagcaaaagacrgagatgccctcttacagttcgatgaactatacatccaatttaccagagtcctttcacagttagttccagttttagcatcctgcccttacttgggcttttctgaatgagcaattaaacatcagggttttcagattgagccctctgtgcaaagggataagaatgattcacgctaggttctgccttccaagagttcataggtgggatttaaatagataattgtcaccaagttataaaatttagtccctgtttccataagagaagggttgcgcagtggctggtcccttttatatataaatcatctctttagccctcatcttcctcaccccgggttcttccccatttcatagattgggaaagtgaggtgaaatcacttccctgggatcccataggaaggcattgtgttttcataatatattcacatgacttcaaattcaaaaagcacacaatggcatagaatggaaagggtttgggccagtcacttccctctggcgttgaggtgctcatgtaccctgtgcccttccggagagattccagcatgctgtgcacacctgcatgttgacccttgtcttgccttcttcctgcttgtcagatccttccatatccggacatgcgtagtgcctcatccttgcagccagcggccttcatgctccactgtaattcgtgggtyagtgggtatatgcacttgttgtttttgatgctaccacatggggatatttgcctcgtctgaactctgtgtattctctgctgcaccttgttgcttctttgcaataaacttcctgaactcaaagctaatactggggggaatcccagaagctgctgagggcagggccatgctgctcagtgttccaccctagctcctgacagcatttccctagaaaactgctgctgggcctctaatggagcaaataaatctgtgtacaactaggcagcaatagtttgtccaaaagtcctggtgtaatctagtccctcaaactgtgcagccttacatggagtacacacacacttgcagccttgaagtactacccactgaggggagaaggcacggcaaggggaaaggttggcacaggatggagcaagtgctttttctcacacattctggaggaaaagttatccagttcttctgttctagaaacacccctgtccttcagaaaccagggtctagttgctctggytaccaggcgtgagcaggtggtggtagcaccacaggccccggttaccatcactgtcccatgtctttgatcttcgtccttgtggggactggcctgcatggcctcggtggcagcgagccctgcagaggcaagtgcatcagcatcactgtgtttgttcccaggttacktcggcgctgctaccgtgggtgctgctgcatggtggttcattgctgctgacggtggtccaagagtgtccttctaccagctggtactcagtcacctttctttctgtaccttacatgagaagtgttgtgaggccttgacctttctgtggtttcggtatctatcaaatcatcttaagactcagacaataaacagttacatctaagatgattctgaaggaccagggcttctccgagaaattggggtaaacctcttggctggctctgcattcaggctggtctgtgctaggcttggtatggggttggagcctggacttgggaaatatactgggctgataggaatttgattggattttcttgcagagtcatttcctacagkgtaaagaggacaacccggactttgaaggcgtggattgtgcaatctttgaatccccatamccgatgacaatggcgctctctgttctagtaactatagaaatgtgtaacgccctcaacaggttagtgcaccttcacggcaggctgaggcgagcatggtgactgccagggcaccrgggaattgtgtgtagtcacggttgattgaggatcacaggacagttcttcccttcccaaaagaaaggagaacaggcaataccagttttaaaagcatgagctgtcgtcacctccaggaagtagtgggagtgcttagccctgtgtttcttaggagctcttccttaaaagaaaccgtgggggccaaaaataggaactttggtacccctgtatgccagcacccacagggaaggaacctcaccctttcacacagacaaatggtaccatccagttaagcccgtgacaaaaatggaaatttctaaatagcccaagtctccagggcaattgggaacagctttgaacccactaaratggggtctgctatgccaaaacatagatacagaattcacagtttgtcctgcattaggacattctcttcaactttgccactgtagaaagtggaggtaggtcagcggatggtgccacatkaacagccgccttactgaagtgtagtccaacagggtcttactgccactgtgacacgtgccttgccttgggggtgcgtttccccacctctccttgctctgcagcttgtmckaaaaccagtmcttgctgaggatgcccccctgggagaacatctggctcgtgggctccatctgcctgtccatgtcactccacttcctgatcctctatgtcgaacccttgccagtaagtggttgggtggggcttgggaccagccacctccttccaggggaggctggaggcgtgacacgtcttccctgtgtgtcagctcatcttccagatcacaccgctgaacgtgacccagtggctgatggtgctgaaaatctccttgcscgtgattctcatggatgagacgctcaagtttgtggcccgcaactacctggaacctggtaaagagtgtgtgcagcctgccaccaaatcctgctcgttctcggcatgcaccgatgggatttcctggccgtttgtgctgctcataatgcccctggtgatctgggtctatagcacagacactaactttagcgatatgttctggtcttgactgacagttttccataaagaagatgtttaacttaatcaattaatttttttattgtttaaagcaactgtctatttctgctgaattttcacatgaacataytggctggtgawggaggtttcatactctagattttgttttgctttttctgactccagtgggrcaagattttccttttttatacacataattaaagtgtccattgacatgtacagagaactaacactattttatgcaaatatttttttktagatgaaaaagcatgtacagtgttctgtttaatactcatccttgtataaaaaaaayagttgagccagcagacattgtcagcaaattaattggcagcagattttaggaaatgaatgtgtgtggttttttttctaaaactaaatagcatgtattgtgtcttttgcatgatgatccggatttaatttgatatcacagtctaatttttattcataagccaatttttctgcactgagcagagtcttgctacctcagtcagtattgttttggtttgctacttccctcacccactttggcctccgttcaccccaccccaccccacctctccccaccttacccccgccccgcttggcttcttctttaggattgtgatggttcgytctgtttacatcagttttaacgagaggtatgcctgtactcgcttgtgcagaaaacattgttccagattcaatcgactgggtttatgtcccttcacatagtttttaaggttatttatttaaatgtctaatgtattttattgtaacagacattgttttgccaacattgcytatttcagtggcacgtcatctagttttaaaaaaataaaacattttaaatggacagagaaaaataactgtcttgtctttaactcgtaagtggcttacctgggactaacagacatgtccaactttctctccagttcttagctcagaactttagttgtactctgcttgaggggaagaaggctcctgctctgctgtgtaggtagtcataggaattgtattcttaatgtacaggcactaattgtcatctgtgatgtacattttatgcaagtttctgctggcctggtatagagaacataagggcaagtgtgtatgtgtgtgtatgtgtgtgttttgtaaaatctgtaaatagcacatgaccaaatgaacatattgtatagaactatttttatttgaatgtggcactaaccaccaccaccgttactacgatcaatgtttgcgcatgttcragatgagtctcaccaacagtgtgtaagtcattaacagtcctaactgtggtgttttcctccaatgccttccaacatccatcaactaacgtgagtattttcttcctgggatttggatgctttagcctaaaggtgactgccaccaagtgagataactgtatgtcactaacttataagccgcctccatggcagatgctgctgtgctccctgatgccctgtgagcaccggggttgcctgtggcgcctgccatgtgactcggrcgcagcatcagctggctggaggtgtggctttcatagacctccacaggctgcctaggacaagatgaccaggagggcccaagccagacaaaagccggagtggggagagaggcatttcagccagaccaacaggctgaaggagctgtgcagactattgctaaaatgagggttcgcagctgccaggagtcatcccagaacattgctacttatttattaaaaagctaaaaactagtgaaagcaagtaactgaaccagtgaactctgggtatcgataggttcrtcttaaataggccacttccccactcccccacccccccttgcttggtcttgtccttggtggctaagacttagctctgcaggggatgttaaagcacagttagtaggacgtggctctgcacagcccaaaaaccagcttactccttagccagggtgtgaggcctcgactatattcttcaaaatgtacttaggctctggttactgggatggccagtagatgtaatgcagatggttggagtttggggagggttaggaggcatcaagcaggacaaggtgctgctgagttcagagggcccacgttcaagggatggaggtggaacctggagaccgactcttaaaagcacagtccgtggttgggtgtggtggctcatgcctgtaagtaagtctcagccctttggargccacagcagaaggattgcttgagcccaggtactcaaaccagcctgggcaacagagtgaggccctgtcaaaaaaaaatcagccttactgtgaagcctccaaggctgctcgcaggcagctgtggctctcgggaagggaggctgctttgcccagcagggaacatttggggcagggggtaaattttgccagtttgagcatcatgaggtgtaacaagaaatgggttgaatgggccaaatgcaaggagtgcatctctgggctgcaaactgacttgagtgctgcactattgctattccgtgcaaacaaaactcagcttttcctgactcagttccttgacttagtggcctttacaaaaaaagttgagtagtgtgtggcctgctgtcgcacagcccctagttagcttcatggtttctcagcttcagacccctccagcccacagaggagcccatggagggacccacttcccttggtccagacagctgggagtgggttaggcccactgctgttttgagcagggccacttgctccatttcactgaagsctttgctgggtgaaaacacttcagcatctcctcctcaggtcaacccataaagaccaggtccagcaccgtggtcttggcacatccctggcctcaggccctcacctaacagtgaggcagcagctgcccagccccgcaatgtgcctgctgtcaggcagctcttgcctgaaacttacttccacattctttcctgatgggcaggtggctgaaggcccagccatcagtgtcgcttgttgccaccccgtgcctcccttggcctctctgagctttgcccagaagaccaacaatcatacataccctaactgggacacyactctgcagaatgcagatgatccattytggaggaagctgtcccttgagctcagtgagctcccaggcaagcagggcatctggccgacttccctcacaacagctgctcccacatcccctcggactggagcttcagccctgactgaggtgggcagacctaagacctgagaccacaagattagctcagtgtctaccaagcatctagccactgtccagggccagagcataccacgtctgcagtgcctgtgagcagagccagcagttgccctgtgactgtaaccaccaaattgtccaaacacccgctgcagttagcaagaagggtaggcttcaccctcctttactgaggagaatgatgcggaggagtttcctctccagggctaggcaaggcaggcgagcagccagaagccgggtgcccacagggcagggacaggaaggctgtgctgctactggctgctcacttctccatcaacctcaccctctgcaccactaaccaagaccttgtcctcttgcctgtctcgctgctttcacagctgcaacgattgtgtctgcctsatggggttttcctccagagcctttattctgtagccagacgacacgaggagtctgtgtcactgagccagtgcttctagatgctaccctgtgtgggcggcacctcagggacagtaaatcagaaatgctggtcttgaaaccttgaaaagatcaagctgaatgttccttttcatctgtcgctgttgatcttcatctatttaaataggtattctaacgtttcctctctgtatttcatgaagctgatttcctctctctttccttttcagcaatactggagtaaccgcttcctaaaccattttgcagaaatgtaagggtgttcggttgcgtgcatgtgcgtttttagcaacacatctaccaaccctgtgcatgactgatgttggggaaaaagaaaagtaaaaaacttcccaactcactttgtgttatgtggaggaaatgtgtattaccaatggggttgttagcttttaaatcaaaatactgattacagatgtacaatttagcttaatcagaaagcctctccagagaagtttggtttctttgctgcaagaggaatgaggctctgtaaccttatctaagaacttggaagccgtcagccaagtcgccacatttctctgcaaaatgtcatagcttatataaatgtacagtattcaattgtaatgcatgccttcggttgtaagtagccagatccctctccagtgacattggaacatgctactttttaattggccctgtacagtttgcttatttataaattcattaaaaacactacaggtgttgaatggttaaaatgtaggcctccagttcattttcagttattttctgagtgtgcagacagctatttcgcactgtattaaatgtaacttatttaatgaaatcwgaagcagtagacagatgttggtgcaatacaaatattgtgatgcatttatcttmataaaatgctaaatgtcaatttatcactgcgcatgtttgactttagactgtaaatagagatcagtttgtttctttctgtgctggtaacaatgagcgtygcacagacatggtttcaggtaaataaatctattctatgataaattctcagtgtggtggtgactgttctgtgggagggggactgatgggcaccaagggcctccactccgcacccgggcctgcccctctacagggaagcaggggaggctcagtctgggcagggtggccatgtgactagaggggacaggaacctcttggactcgacttcacagtagacaggctgactggcagcaggtccgcccatgtgaagcccaccctggctccctaccctttaaggatgggggaagctgagtgtgtgttaccagtggggtcttaaacacacaaggcctcactcgtcagtgtggtgaagaaagccaagactccgcgctctccattgttagcagcctggaaagatctggagactagcaatggagagatgtttcttaggctgttcagatccaaaacttccacattccccgttgttgataggtatgggatggagaggtgaacagaactgaagcagctgttggaattcatttgctggttactttagtgcttatttggcagtgatgggtttgggattgggtttttggttttgcacattccctaagatgattctttatcactttaaaaaataccaggatacaaggatagctggatgattctataaatctaatttttaaaactatcagttctgggtaggcacggtggctcacgcctgcaatcccagcactttgggaggccgaggcaggcagatcacaaggtaggagatcgagaccatcctggctaacacgatgaaaccccgtctctactaaaaaaaattgccgggtgcggtggctcacgcctgtaatcccagcactttgggaggccgaggcgggcgaatcatgaggtcaggagattgagaccatcctggctaacatggtgaaaccccgtctccactaaaaattcaaaaaattagccgggcgtggtggtgggtgcctatagtcccagctactcaggaggctgaggcaggagaacggcatgaacccgggaggcggagcttgcagtgagccgagatcgcaccattgcactccagcctgggtgacagagcaagactccgtctcaaaaaaaaaaaaaaaaaacaacaacgaaaatacaaaaaattagctgggcatggtggcagttgcctgtagtcccagctactcaggaggctgaggcaagagaatgaatggcgtgaacgtgccactgcattccagcctgggcgacacagcgagactctactgatcagttctgctgatggagaaaaaaaatttgataaaatttaacatccattttctaaaaattattcctatgtaccatttattattagaaaccaaaagtgttaacgctttagagttgcattccaagtccactcttgcccactaccaaacactgttctagaggtgctagtcagtacaatcgggcacgagaaggaaaaaatgccttggaatgaacaaaaagcgatcaggggtcatactgggtcaatgttcctagacaggaactattttgttcctagttagaaatgtttaatgattcagggaaaattgacagctgaatgggagtgacatataattcatactgatatatgagaataccaatggtggccttaggccaatcctaacaaacatcaggcagacaaaaaccaaggaagcacaccaaacctcttaaagctatggtaattcagtgcatcacttgagaagggtggtgtttcagcttagtaggtaatagttggattattatgtggggggtcatcttgagaaaaataaagctgtatcccttacacccaataaattgcaaacggatcaaaatacttggaaaatgcaactatacccccaaaagaaacatggttaaatggtgtaaacgagagaaaacaaatagctcatgtgaaaagatgctcaactccactggcaaattaaaatcacgaggtaacgtctcgagaagtgggtcttctgatgccaaggatggagcagcttgcgaggatgaactctagggaatgaccgaaatcactcagcctagaggtgttctcaacacccttacccctgcccccgccccaagcaggtccactcctagagaatctcacacatggggaagagccacagcagagtttttggagaaaaatgaaaccaccagcaggaaaatgggtgagtacattcaggcatattcagatgatgctcagctatgaaataagctagaactacgttatcaacctaaataaatcctgaacagtgaagccaagtgcagcaacatatcaatatgcacaataccgcctcatatcctctaaacgtggcccacgggccaggctggctgagagaaagtgtgtacaccagagtgtacatcaacgtggactagtaccaaacagattggtaatgagtttgtggacatcagccagaggctgtgaaagcccgaatcgatagtggttaattcagtgagggagaggggcggagacgaggaaaggcagatactgctttacctatcagtaaggaaagtatagacagaggtgttcattatgcctgtttgcgtgtcagattttcatttttggggagggtgggaagtgacagtgtcccaggctggggtgcaacggtgccatcatggcttgctgcagcctcaacctcctgggttcaagcgatcctcctgcctcagcctcttgagtagctaagactataagtgcacactaccacacctggcaaattttataatttttggtagaaatgggatcttgctacttgcccaggctggtcttgaactcctggcctctagtgaccctctcatgtcagctcccctagtcgctgggattacaagcataagctaccacacacagctctcagatttttaaatatctatatcctttgatcaagaacttcactttcctgaaatcctcccatatgttcaaaaagtataatccctactgcactcttgtagcagaagagtggaaataagctgatgttcatcaagaggcaagaactgaataaggtagagagcattcaaaccatggaataccgtgcagcctttgaaaaagacaaggtacacgtgtgtacgagcaaggaatgatgtctgatatacgttgtctgcccagggaaatattcaattacagagcagtttgtattataatctaccattttttagaaacagaaggaagttaacagtttctagtaatgacagttgctgagaataacaaaatgctgcatatagatggcagatggtggaagccaggtctctctgttggagtgggaggaagcagaggaagcaaggggagaagctaagataagcaaggggaggaagctagaataatccatgtggtaatgaattagagccggagatatcaggatgaagtcatgtttagcttcatatgtacggatggtttcatatagaaacactgatagtggcgaggcacagtgactcacgcctataatctcagcactttaggaggctgaggcaggaggatgaggagcccagcagtttgagaccagcctgggcaacacagtgagaccccacatctacaaaaaattttaaaaattagccaggcatggtggtgcctgcctgtagtcccagctactctggaggctgaggcaggaggatcacctgaacccagcaggacaagatcacaccagtgcactccaccctgcacgacgcagcgagagcctgtttcaagaaaaggaaaaaagaaaaactgctgactgtgatgtgtatatacactggtcactacacacatgcatttccttgtactgtcagctcagaaggcaatgaacacacttggcttccagtgttaggtttctaatgccattctccagtaaaaaagggctccttggagaaatggctgattctagagatgggacagaaaacgtacagtacgtgcctgaagaataccaaagcaccagaaaggaagggctcaaaaacagcaatcaaagatgtggttatgtgaaaggaacacaggagccaactgaaaaagccacaacagccgaagaatgtgagcaacaaaataaagcagtattggactagaatccaaagtataaatatccataagtccacgctgacataaacaaataaataaatgggggtgactacaaatcttccatgcagaattccaagtaatttacatggacactgcctcaggaggtggagactcacctcctctgtgggctgtgcaatgttccaaagagtacatacagtagggatgggaaagtgcccgtcactgtggagacctgacatgctacctcagccagggggcgtcatcttgaaagcatgggcccttgatctgaagtgatgaaaatggcattttacctttgtggtcttcctctcaaaatacacaacctcagtctaatcatcatcagaaaacacctgaccaatccccaaacgaaaaatccctgactggtattcctcaaaactgttgaggtcatcaaaccaggaaagtgagaaaagtataatcatcagaatgtaaaaacgaatggggccaggtgcagtggctcacgcctgtaatcccagcactttgggaggccaaggtagttggatcacttgaggtcaggagttcaagaccagcctgatcaacatggtgaaaccccatctctactaaaaatacaaaaaaattacctgggcatgatggtgcatgcctgtaatcccagctactcaggaggctgaggcaggagaatcgcttaaacctgggaggcggaggttgcagcagtgagccgagatcaagccactgcattctcggctgggcaacagagagagactctgtctccacaaaaaaaaaaaaaaaaaggccgggcgcggtggctcacgcctgtaatcccagcactgggaggccaaggcaggtggatcatgaggtcaggagattgagatcatcctggctaacatggtgaaaccccatctctactaaaaatacaaaaaaaaaaaaaagaaagaaagaaattagccaggcatggtggcgggcgcctgtagtcccagctactcaggaggctgaggcaggaggatggtgtgaacccaggaggcggagcttgcagtgagccgagattgcaccactgcaccccagcctgggcaacagagggagactccatctcaccaaaaaaaagaataaaaaaaaggttggccagcctgggcaatatagtgagacctcaaatcggcaaaaaatttaaaaattggccaggcaaggtggctcatgactgtaatcccagcactttgggaagctgaggagggtggatcgcgaggtcagcagttcaagaccagcctggccaagatggggagaccccgtgtttactaaaaatacaaaaaaaaaaaaaaatagccaggtgaagtggcaggcacctgtaaacccagctacttgggaggctgaggcaggagaatcgtttgaacccggggggcgtaggttgcagtgagcagagattgcgccattgcactccagcctggctgggcgattgagactccgtctcaaaaaaataaataaataaaaattaaaaattatcctggcatagtagcacatgcctgtagtcccagctactgaggggcccaaggcgtgaggatcacgtgggcacaggagtttgaggttacagtgagctgactgcaccactggactctagcctgaacacagcaagaccctgcctgtcgcaaaaaaaaaaaacaaaaacaaaaacaaaacaacttcatggttggatgtggcatcaaaattgacacagcaaaataatgaatgaggctgggcgcggtggctcacgcctgtaatcccagcactttcggaggccaaggcaggcagatcacctgaggtcgggagtttgagaccagcctgaccaacatggagaaatcccgtctctactgaaaatacaaaattagcccagcctggtggcagtagcctgtaatcccagctacttgggagactgaggcaggagaatcacttgaacccgggaagtagaggttgcagtgaaacgagatcgtgctattgcactccagcctgagcaacaagagcgaaactctgtctcaaaaaataataataataataatgaaatggtcgatgagaataaattaattagaatgcagcagaaggtgagggtggggagaaaaggct

SEQ ID NO: 95838 - DNA, 127736 bp, Homo sapiens
  misc_feature (1)...(127736): n = A,T,C or G
tacaggcatgtgccaccatgcccggctaattttgtatttttagtagagatggggtttctgccatgttggccaggctggtctcgaactcccaacctcaggtgatccacccgcctccgcctcccaaagtgctgggattataggcatgagccaccacgcctggccgaataagccactttttaaaatgtatatgtatgcattggaaaatgccaaactatcaagaactaaatgtggtcagtgaaaaggacagatcatttcactttcttcttttctcttatatgtatttaacacatttcatatagcaaatatattttatatttgggaagagaaaaacaagttgcttttcatttttttaagtaggtaaggaaatgagtacaatgggaaaaatgatataagaaagttaaaatgaaccttgaggttacttctaaaaatgcaagcaataagattctgtacagatgggccacacattttgctctaggctttcgagagccaacagaaagagataaacagagtcaattacagtatctatagtatctgtgagaagaataatctgttaacaacttaaaagtaaatacaatggcagatttcactgggcttttacctatatgtaggctgaaaataaaatgctgaaggtcaacagaaagttaaataccagtttacctttataaaaaggtggccgtaaagtctggaaacacagacaatgttattttattttttacagacttaagtaaataatattatagtatatattgattttacacattgaactccctgattacttacttcttctgaggtatgctaaaggtacaggtttattcaggagaaatcagagggagaaatcaactgaggcaacacattgcagctgattttgcttttgcttggattgggaaaaatgttgtatcaatgcaccatgctttgtaacatgagcattgttacaagggacaacacaattcacataccatgtaatgtcactgaacatatcatgtaatgtcactaaacatattacgtaataacaacaaaccatttattaggtatatttgctgtgtttacagatttttatggccaacctataaagctgtctaatattgttataggtatgccttcttgaaattccacaggttcactttagcttttctaggaaataacaaaattccttaaatttcctttgacccagatttagtataacttcaaaggaaggagatttttttcacatttatgattttattttggttttacacaagtaaattttggaagactatgtttctttgcctctagaagggtgagacagctgcctgatttttggcagttacatgcatgtattctgtgcagctacatgatgacaaacgtgatctttgctgcttttgcccaagcacttattttgccagtccagtcatagtgaaatgtgggatgccatttctaagagcacatattaagggactttttaaaaggaggaaccttcacgaaatacttcacttcctaaaggctttattggatgaaatcttcagagaccagctaatgctcaacttaaaggttttcttagaaaatgttcaaccatccaatcctgttatcattaatacattttaatttatatgaaaacaatgagtttctcataattaaggtaagattcttatgcttcatccaaatggcttgataagaaaaaaatgcaaacaaaccatgaatagtttcaaggaagatagagaaataatcataagggctgtaagctctttgtagtcaggaatgatgcttcttgtctagcagtactacaggtggaacatattcaataatattaaaagattatttgatggtaatactgatttaccataatgtttttattctaagttgtttcatattaataaatcaatgctgtgtgttacaggacagtttttaataagtttagtctgggtatagatagactgatttttccattaagtactgactagactgagaaagtaagtacttcttttggacgtgggggaccaagaaacacctttgtcattacataaccatacaaggtacacatactttttacttgtcaaataatcagtcagtgcttttccctcctaaagatatttattcttcaatggtgtatctgagagacagaatgtcctgggtagcctgtttttttccacagatttcatccaagatatcagaaatctatctctttcaaagtttaccaagtaaatatttgtctgcaaggcaagtaaattaaacaaagggaagaaaggaaaacaattatcattaaacagtattaccattctattgaaaaatggtttcatttgaaaatagatgtattttaagaagtgaatggtaactaatggaggaaatcagcatgtgttcaggtagaagtgcagcagccctgggcaccatccccttgccactgggcataccttgtctaaccagtgatagagctgaaccacatggtcctgtccccctgtcaaaagttatggttagtttaatccttgctcctcgggaggctaaggcagcaggattgcttgagtctaggagtttgaagccagcctgggcaacatagcaagatcctgtctcttaaaaaaaaagttatggttatatgtgtgtgtgtgtgtgtatgtgcacgcgtgtgtgcgtgtgtgtgtgtgtatttggagtctcctctgtcatccaggctggagtgcagtggtgccatcaaagctcaatgcaacctcgaattcctatgctcaagctattctctcacctcagcctcccaagtagctaggactaaaggcgtgccccaccatgcctatttttattttttggagagacagggactcactatgttgcacaggctggtctcaaactcctggcctcaagcgatgctcttgcctcagcctgtaacccaaagccctgggattacaggggcatgagcctagaatttattaagccttttatttttaacatgaatgtttttcttttataaaatttatacaggttagcaagtatatattccttggtacaattatttggttaatgtttgtctcccctttcatggcaacaaagactgtactgttttgcttaccaatgtattcacaggggctgacattattgtaggtgctcagtatatagtacgtttgttagagaatatatgagaatgcagaaagaaatggatggaagacagggctatagaaatggaaggaaaaagtaaaccatggcctcttcaaaacagtttacgtatctgctgttaagactattgctgatgctggagccatttaaagccattttgaagcaggacatgcttgctaaggaaattgtcattatatgttgtcccaatgaaaaaaaataaatcgaagtactgtggtatctttactgttctatgtaagttctatgtaagttctcagggtttggctatttatttggtaaaagaagcttacagtatcctaacttgttatttatacattgctcctatcccatttctaggcttgagtctttgataaccatccttttcctcaagatgaaatttcatatgaaaaacacttgagccggccggcacggaggctcacgcctgtaatctcagcactttgggaggccgaggtgggcagatgatttgaggtcaggagttctaaaccggcctggccaacatggtgaaatcccgcctctactaaaagtacaaaaatgagccgggtgtggtggtgagcgcctgtaatcccagctactcgggaggctgaggcaggagaattgcttgagccggggaggtggatgttgcagtgagcagagatcgcgccactgcactccatcccaggcaactgagcgagactccttctcaaaaaaacaaactccgggcgcggtggctcacgcctgtaatcccagcactttgggaggccgaggtgggcggatcacgaggtcaggagattgagaccatcctggctaacatggtgaaaccccgtctctactgaaaatacaaaaattagccgggcgttgtggtgggcgcctgtagtcccagttactcaggaggctgcgacaggagacttgcgtgaatccgggaggcgcagcttgcagggagccgagtttgcgccactgcactccagcctgggcgacagagcgagactccgtctcaaaaacaaaaaacaaaaaaacaacaacaaaaaaagaaaaacacttgagccatgggccagacatatcaacccaaacactgattgattacaaacctcatatgtgacacctaacaataggatctctcactttctcctttgcaagtaccggactccttcgtcttcctaccagactcctctttgggcatttaaccagttcttttgccaacagcatctctaaattgggattgcatctttgtaatagactaaacttttgtgaaactgccacatatctggaatataagtgaattgtgttactcttgtccccagtgtttcttttttcctttttctttcttttttttttttttttgagacaacgtttcattctgttgcccaggctggagtaagtacagtggcttgatttcagcttactgcaacctccgccttccaggttccagtgattctcctgcctcagcctcctgagtagctgggactacaggcgcacaccaccctactcggctaattttggtatttttttttgtagagacaaggtttcaccatgttggccaggctggtctcgaactgctgacctcaagtgatccaccggcttcggcctcccaaagtgccgagattacaggcatgggccaccgcgcctggccatccccagtgtttctaaacgtgtcaagtgtgatccaaatttcaaaggtttggattttttcttagatgacctgataacttagattctgcttttttagctttcttgtctcagtgtactggacaatttgcattatttcacggagggctcaacactgtcagtcagccaacaacgtctcatccccaggatacaccactccttgaaactttcttttctacttggtcagtctgttaggttctcaggacgagcgattgcagacctgaggtgatttgaatgtccttggtaagaatctatcctcaaagggccttcctgcttcaaatgccaggttatagaaattcttccactgggagagttattcctttggattaaagcagtaccgtgccagtgttctgcattttacatttaaggggggcagacacatgaagtcacctttctgaggttttctgcaaaagattagctgtggatcagatcaggtctagggcaagtatgaaagcactagtgaccttggggagggggaggaagctctgggattcggcgctagggaaaagtggaagaggacaaacttttaaaaaatccgttactgggtataggccacagagtgtctttcagattacaagattttaagatctggtgctcagactcttcttgctatgctccccccgggtccaccctccagcctcccccaggcccgcctttcttccgcagccccgtgccggtcttcgatccccacctctccagaagagcgccggcggctgccgcgtacctccttccccgcctctcccaccgcgcagcgccgcgggccggcgccgcgcttcctacagtcctacgaaggggagtaaagcagaagactagcgcactctccctcaattgtcaccctccagctttttcccccgtgcccaaggctttcggtcacctcttcataaataataaaaaccagagtccagaacctgaataggcaaccgctgatcggtccagctcgcttccccgccagtgaaaagcaatcttatttcagcgtcaacgctctatgtcttgcagtccgatttcggctgacacacccgtgccgctgtccccgcgccgggccctcgagtcctgtcacctcgggcagcctgcgcctggctctggggcctgggcctctcccctcctcctgcccgcggaccttgccgccccgcctccagcccgtgccacggcggccgccattggcgcgggcccatcccagaacggcgcccattggcccggtgcgaagccattcacccagcgcattccgccgcccgcaggcttgcggggaaacttccttattattgtgacgccgaaaacggagaaaccccgggtccggcgagaggggctgtgacagtcggagtcccaagctgcggttcggctgctgccgaggtgcgcagggcgggggccggggttccagggaggggggtacggcggagctgcagccgcgctgggccgcgttccgcctggcactgcagtcagcgcgcggctcccggaggggcggctgcggctcctcccgtggctccggcggcgggggctgcaggcacctccagagacgacctgggtctggggcgcggggaggttggggcgcggcgcccttagtaccctgcgtacgcctccctggcgttctcgtgggctcgccctccggtcagagagccccgcgccgggaaaggcgagacaagccttcaaaatgggagcgcctcccgcccgcgctcggccgccctcccgccctgccgcccgggaggaattgcgacgcagaaagtcaaaaggaggatagtccctatgctcgccccctgcccctatttaaattctggggttccagggacctccgtgcagtgaggggcgcggacgctttcaattgaaatgggagctggcgaggccctggcattttggggaacctcagcggccgcgaggagtttgcgccgaggacgcggtgcacggcgtccgcgatgacagcgccggcagggctgcggggcccggcaccacccacttcgcggaggccgggccggctcgcctctcccgggtccgcctcctgggcggggccgggggcgagggtgtgtgcggacacgtgtgtacgggtgtgtgtgtgtgtgtacgccgacacgtcggtgcggaccgacgcgggggtgtcaggagctgggacggccgggggcaggtgagacttgagtcatttgtgaatgtgtggagtgggcaaaccagggcaaccagaccgagaggagcatgtgtaacctgaaacaggtgagcctatggagacagtacctaatgcgactgtgcacggaatatgtgtatgcagcatgagctccagggaataagtatttgaactttgctgttggtctgtcactgtttctggctgctttctgattgcattttacatcagctttcaaatgagctcaattaggaagtacctaattcagagaaaagccttccaggattttgcttgcattcatcacgcatagaatgctttgggaaagacgattcaagagctctcttccatttgtatgtgtcttctggctctttccacaaataagaagctatttctagaaccttttatttgatgattagataagatcaagtgagctgatttttcaactctagacttgagagaaatgaaaaaataaaaagttttaaatgcggtgatcgggtatcatgttttagtcggcagattactgtgaagctctctccttttgtactttcctttaccctgggggaggagggagtagcattataaatcagaaaagcaaagtacatggattgcatatcctaaagcaaaataattgaattacatattttacatcatggtcgtaccgccttcgaggctaggaactttctgtaaaaagtataatgcagggaacaaggaggacaggttagaaacctctttggcagaactcctttggcatgaaaaacaaaattagcacattagcactagcatccagttcttgttcagtaagtagctggagtttactttttgaaaaagaaacagggatttcagaatgttccatgttgtgtgcttgaagccattcgttatagcatttcattctgaagaccaaatttaaatttcttaagatttgtatgaccaattaaaaactttttttatacttaatgagagtagtagtacccctactggagacacaagatagttatgcttcagttttataagtaaaagtactattctccagatcgaatgggattttctgcatagagaggtagaaataaagttatgacaatatcttttctttcgagatggggggtctcgctctgttgcacaggctggagtgcactggtgcgatctcggctcactgcaacctccgcctcccaggctcaagcgaatctgccaccttaccctccaaagtagctgggaccacaggcgtgcaccaccatgcccagctaattttttgtagtttttggtttcgccaaaagacgaaacggggttttgccatgttgctcaggctgatctccaacccctgggctcaggctgtccacccgcctgggcctcctaaagtgcttgacaaaaatatcttaaaatcatggaggactttttcttttgagatactttaggtatctctctgagatgatctcttctcattttgcatgatggaggatgtggtaatgaaaagggaaagaccgggtgcagtgactggctgggcgcagtggctcacacctgtaatcccagcactttgggcggcttgagacgggtggatcacttgaggtcaggagttggagaccagcctgaccaacatggtgaaaccccttctctactaaaaatagaaaaatgccgnnnnnnnnnnnnnnnnnnnnnnnnnnnnnnnnnnnnnnnnnnnnnnnnnnnnnnnnnnnnnnnnnnnnnnnnnnnnnnnnnnnnnnnnnnnnnnnnnnnnnnnnnnnnnnnnnnnnnnnnnnnnnnnnnnnnnnnnnnnnnnnnnnnnnnnnnnnnnnnnnnnnnnnnnnnnnnnnnnnnnnnnnnnnnnnnnnnnnnnnnnnnnnnnnnnnnnnnnnnnnnnnnnnnnnnnnnnnnnnnnnnnnnnnnnnnnnnnnnnnnnnnnnnnnnnnnnnnnnnnnnnnnnnnnnnnnnnnnnnnnnnnnnnnnnnnnnnnnnnnnnnnnnnnnnnnnnnnnnnnnnnnnnnnnnnnnnnnnnnnnnnnnnnnnnnnnnnnnnnnnnnnnnnnnnnnnnnnnnnnnnnnnnnnnnnnnnnnnnnnnnnnnnnnnnnnnnnnnnnnnnnnnnnnnnnnnnnnnnnnncacttaattcttagtggaccaaagttacttggcctctgaaggccttagctgccattaaaatgaatttaggaatgtaagtcttttgcttagaggttagatcaaatggacttttaataaggtggtaaatttgataatataactctgtcccctttagacatttactccatttagaaatagtacttgttggtggcagggacatgtgtttctgtgtaagtgaactggttttattattactcagggtgggggatctttaacattatctggaaaataaaagtggttacaagttgaggtggtggaaattcaggttttctaagaatgggggtcagttcactaggcatttatcaagcctctgctgtgctcttgtactctgctgagaatggaaggcacaaagatgagtaaaacctggttccttcatggagaaactcccagtctgcacgttggcagggtgttagtggaggaggtaggagaagcagccatactgcctcaacagcgctttgcatttttgtttgttttgtgaagtatttgtaagcataaaataatgcatgtcatatatgttaagaaacaacaataaaaggacagaagcagaatatcagccatgctattgaaatgtctccctttgtgctccttccagattgttccctctattcctactgcctccacaatcattacccgctattttgtgtttgtgatttgcttttcttcatagctttgttaccactgatgattcttaatctccaaataatatatttgttatagttgtgtttgaattttgtaaaaatgcatcatactctgaattcttctgtgactcaacactttttaagatttagttacaatgatgcttatagatggagtttattttttactgctgtacagtgttctgttttatgcatgtgccacactatctgttttcttattgatggatatttgttttttgtttttttcctatttcaaataatgctggaatgaacattcttatacgtgtatcttggtgcatatgttcatgagtttctcactgcattggactgtaagatagccactagtcacctagggctacttacattaaaatttattaaaataaaatattaactatttcagttcttcacttgtattagtcacatttcaagtactcaatagccacatatacctactggctaccatagtggacagtgcaaatatatagcatttccattatcacagaaagttccaagtttccagattttactcatctttgtatctccatttattagtatagtacaggagcaccatagatgcttaataagttggataatgctggtcatatgcccagcagtgaaattactgtgtggggaggtatccacatcttcatcttcactggagaatgccaacttgttttgccaagtgcttatgccagtttatattcccaccagctgtctatgagggccctggctgttgtatatccttgacttggtattgttagacttttcaattcttgccagtctcgttggtgtcttttgaaggcagtccacagcttaagcagactgcagagaagtcattcttccagcttcacaaagcctagcaccaggtagtgaagaaggcaccaccttagaggggatgatccggggaagggtaggagtgtttcctgtgttggctgagggggtcagaggaccaaagtccagctaaagtggaggagagagaaaacagcaaggagtggattcacgttgttgaaaacttctctttgccttctatgacatttctgtctttggtaggaacatttttgataataaggcaagtcattaaaatgaatcttctttgttaccagagttaattctgcattttagttttggccctacatttatttaaagcctgaatttggggagtatctgcaaagcactgaaggttttggacattgtcttttcctgctgttgaaagagaccctcttcatatatacaacattcaggtaattgcttctaagcttacttgaaaggaagcttatccctattttaaatgagattagaagtcctgcctgagtgttattttggtctcagtgcctttcaaacaaagggataagaatgagttgttaggctgctgtgtgcatagtcgcatagtcttatcataagacaaagtttaggaactgaaggttgtcgtttagcattcaactcactagagctagtaaaaagagatttatctccccaccgccctccacccatgccctctccagaatttaaaagcaaatgcacacaaaaaaacttcctcctatcaacctcaaatccctttcatgaaagttatggcagatggttgtgatgctactttgctgtagtgcagatttggcagaatgcagctagtgctaattgcagtgaggaagacaggagtcacaatcccatcctcttttgggaattgtcctgtctgctgaaatctcaaagaagagcactaggagtaggagtaacattgactaaagcagctgacatttactggtcacttactactacatgccaggcaccatgctaagccctttttacatgcattttctcattaatcctcacaacactctagcaccttctcctgattttggagcttaaggtgggtaaacatctttcctcaggtttcacagctaacgtggttaatgtagggcttggattttagttcctttgacccttaagctctgctaagattatcttgaatctcttaccaagaatagatgagaaggactcaggaaagtgccaggttgacattgagagaaagttgtacttcaaaagtagtccttccttttgttttgtcatggggaaataagaggcaggaaatgcagccaagcggggctggtgtaggtgctgagggaagtgtagtcctatattttgcagcgaatttcataattgtgtattttgaaggaaaataaaagattctgctcttctaggagcaagcaagagagtgaatgaggaaaaatgggtgtaaggaccttggagatcaaaatgcccagcgatgcagaccgttgctgaaactagacctttaaagtcatggacatcagcagctacaagatttaggggtccaactggagtgtactttgaagtgaaagctgtgctaatggctggcttctctccaatgtgttgaacttctctcctgaaagctagatgattttagttgcttttttctttagttccggcagagcattgtgatgacctaggccgtatttatagttaggattgatagtttatttacagatacacatcttttttgtggttgctatttaattctcttggtgggcagtttttatttgaccaattgaagattccattactgtaactcagttggaagaatttttgaagttttcttgaacaatagtcctttttattatcttttttcataaattgtttttactagtcagtcagggatgaggccatacttcaggctgtttacacaggattgtgcttggccaaagcacccagaactcagatgactctcaaggactgactcgtgccagataaactacaaaaaaagctgatagacccaggacgccaaattaataatgagaattagaaatcctaataagactgagatgctttggttacctggtcacagtattctatccctgtagtagaatctgccctagaaaccaagttatttaaggttgcttgctaagcaaggcaattggttgggtgaatttagtgacaactgttatggaatctgatccacccatccacttttaggaaagaattacttagcgggtcagatagccaggttgactgatcagggtccctgttttctctggagagtggtgcagacacattgggaagtctggccttttggttatctactttctaagctccttactatacagcacagcatagtgtctctttcttttcctttacttcatcttttttttgttagtttcactttcttcatctgtaaattagagataatggcagtacctgtctcatagaagatgaaatgagccaacatctgtgaagcacatagaaaagtaccagactcagagtaagctcaaatcaggtcttatctgctgttattattaataatgtcattattaatattatcagtcaggagtttctttttattgcaagtgaaagaaacctgattcaaacaagcataaataaataagcttaagtaaacaaagaagggacttgttatactctgtatatagttaggttctgtaaagtcatggtgaataccatattagtgaatacagagccattgtttctgaggaaatacaggattaggttcttgtaggctgtggtcaagagatttttatcagccagctgacgcataacctttttttatgtgtgtttctgtctagacagcctatttaatatatatttcttactaatatacacaatatttcttggtaataaaacactagttgagaagggtttaacattttcttgaccctgtgtaatgtgacagtgtttttggctttcagcctcacatcagtgctatccactgtgatttttattttttatgggttgtcatctcatgaatccacagatttaattgcttttccattgtatctatagcttcattatgtactctggatattactttagctctctccaggggaggcctcacatacagatcagcagatttcctgttccatattttggatgtacccgcttgttgattcattaacattgaactcacagccaacactataactcatgcatgaaagaaacttacctaatacacatttttttctctgtaaggcacatcacaaccttcttgcacctaagaacactagaaggtaggagagataagacaaatttatgaaatactaaaaacgaaaaaatccattaatgtggataatagcaattgagcaagttgggaaaaataaattatttctagattatgtgagcttgctggtctattagtgtatcattagaccaccaaccaccaccaccactaccctgccagtttttcattttatttctacttccctctccacaatatttgtagttaattcaaagaataacatttaatcttaatacttttttagtgtagagtctagacaaggaataaaaatcttgggaagaagcagaactttctgtgtaagacagcaaattgagattcagttttatattttattttgggccttttcatgcctttcctgaaagcctcaagagttcaaagcatacctcaggattacaataaggcagttttaaaattggtatataccaattaaggccattgagttaaatccaaagtactgtaattgttgtcaagagaggttgaaagtacgagcttcctctgtgttgtaatctttaatttgtagccatttgggcatgcttttatcttgggagaaaagagtttgtcattttaaaagctgactttgcatagaakagccaattagctgtctccttcatatgttgacagttctctcctgtagattggctgatatattcagctttgatgtgttckcctrgtattataattcaaagtaagtcttcaccatttctgttagaatccatcctcttttcattaggatgaaatgaatgtaccaatgaaaagattagggaagacacctttgaagtctgcaatcttgtcttgaaatcctgatattttgacctgtaggacctagaacagtgattcttaatatggagagactagcatgtttaagaagtatgattagaaaaggatattcaggggccgggcgcggtggcttacgcctgtaatcccagcactttgggaggccgaggcgggcggatcacgaggtcaggagatcgagaccatcccggctaaaacggtgaaaccccgtctctactaaaaatacaaaaaattagccgggcgtagtggcgggcgcctgtagtcccagctacttgggaggctgaggcaggagaatggcgtgaacccgggaggcggagcttgcagtgagccgagatcccgccactgcactccagcctgggcgacagagcgagactccgtctcaaaaaaaaaaaaaaaaaagaaaaggatattcagaattataattaaaatgtatatttggaaaccggctgggctccgtggctcacacctgtgatccaagcactttgggaggccaaggcgggctaattacttgaggtcaggagttcaagaccagcctgcccaacatggcgaaaccctgtctttactaaaataccaaaaaaatagtggggtgtggtggcacacgcctgtaatcccagctacttgagagactgaggcaggagaattacttgaacctgtgaggcgtaggttgcagtgagctgagattgcgccactgcactccagcctgggagacagagcgagacttggtctccaaaaaaaaaaaaaaaaaaaaaaaagtatgtttggaaactgaaatgtaatstgaatgtccttaagaccaatcttctgcattgcttgtttgtttttaagatgggtctcgctctattacccaggctggagtgcagcagtgcgatcacagctcactgaaaccttgacctcctaggctcaaacgatcctctcaccccagcaccccaagtagctgggactacaggtgtgtcctaccacacttggctgattttattttattttttgtggagataaggtctcactgtgttgcccaggctggtctcaaactcctgggcttaagctgtcctctcaccttggcctcccaaagtgttaggatcacaggtgtgagccactgtgcctggtcactgttttctttcatatccagataaagtgattcaaacccaaggcgatgctgattagagatttagcgtctttctcaaatttctaagaatttccgaagggaagaagaatgtttaggttctcttatcatgcctcatccaaaactcttgctcagttgtcagtcttcaggaggggctctgagggcttattttcaaggttctttttattcatgcttggcaaaatacagttattgtaagggtgttgtgtcttaactttgatagaaggtttgggattctcaaaagtagttacagaacaggcaacaagttcaaacttgagtgttagacaccactgttctcaaaattcatctgctgttctctgccacggagaatctactgtttactggccaggttccaaacttgcagccatattacaggcttcaatcgctttctcttttttttttttttttttttgaggtggagttttgctcttgttgcccaggctggagtgcagtggcgccatcttggctcactgcaacctctgcctcctgggttcaagcgattcttgtgcctcagcctcccgagtagctgggattatgggcacccgccaccacgccccactaatttttgtatttttagtagagatgcggtttcaccatgttggtcaggctggtctcgaactccttcctcaggtgatccatctgcctcagcctcccaaagtgctgggattacaggtgtgagccaccatgcccggccaatcgctctctcttaatttgctatcttaaataggagcatctactgttttataaggcatgcttgggatttcccccgtctcctttcgtctctaaatcttggacctttctttcaaaaccagagaggtgcatggggtattttccttgacagaagatccacccacttaagatttccaactttatcaatagtcagaacttttgaagttataatatttcatttctgatcaaagcattagataaagcttcccctcttatgtctttgtaagcaaaaataatatattgaaataattgatacctttcccatattaaactctaggggttgttccctcctcctttctgttgtagaaaaaatacttttgtgcctattatgttggtaataacaattctcacaattaaactcaagaaagccttgttggctgatgtggacctgcagaggcagtagacatgtagcaagagaaaggaaatttaaagacaattaaaaaatctttactgagatataattcacataccataaaatttacttttttttttttttgatactgaattttgctcttattgcccaagctggagtgcaatggcgtgacctcagctcactgcaacctctgcctcccggattcaagcgattctcctacctcagcctcccgagtagctggattacaggcatgcgccaccgcgcctggctgattttgtatttttagtagagatggggtctccccatgttggtcaggctggtgtggaactcccgacctcaggtggtccgcccgccttgacctcccaaagtgctgggattacaggcatgagccactacgcctggcctaaaatttacctatttaaagtataaaatttaggggtttttagtatatttaccatgttttaaaaccatcaccacaacctaaatttagaacattttaccactttccaaaagggcaggtacagtcactctccattctcctctttccctccagtcctaggcagacactagtctattttctagtctattttctattgcctgttctatacatttcatgtaaacggaatcatataatttgtggacttttgtgactggattcttttacttagcataatatatttaccgttcatccatattgcagccaaataatatcccattgtatagatataccatgttttatttaaccattcatcagttgatggacattttggttatttcctttcaatatgtataatgctgttgtgaacattcctttataagtttttgtgtggacgtagtcttgcagttctcttgggtttataactagtagtgaaattgctggatcacatggtatctctatgtttagtcttttcaggaactgccagacatttttataagccaatgtagtatggttctaatagccccacattatcaccaacacttgttgttacctggccatcattgtggtgtgaattggtagcgagagatgagatttttttttgtttgtatgaaagggaaacatgaattgttaaaaggtaatgaaactttaggctagggtcagtaatcaggcaaaagttgattacctgctaaatagaagaggtctgtgttatactgtggtctctgttgaaggagattaaaatctgtttggggagttaagttataaagatataaagagaaagctaccagttaggcagtatagtagacatgtcagagggatgcaggctgacttgtcgctgcaacaatcccagagtctctcaagtaggaagtgaggcttgactcaaatctggaaccaagggtaaaagggaatggcagagaagataacattttttttttctatttctcatcttcacttcaagtggtgaaatactactaaccaatctaatattagggtacctaaaggagttaattggttcaaaattttttaaaacattaaataagcagaaaattcaaaggaatgatgcattgagaaaggataaggtgaagtcttgagagtaatttcaaaactgttactaacttaatggtttgccaagattgtttcagcccatctcctgtactcagtatcctttagcagtgatctgaaaaccatattctgtctgtttactcattcatttaaacaaacacaatttatttaaacttcttttttaaactctgattaaaatacaaaatagcatcattataacataactgytttcaacagtattaatatgttttattttgagttgtaagatatctgaagaatattaaggggagggttatttttwaaattggttacattcattacttgattttctatgacctatttctttttaattaaaaaataatttttttaaactctctcctaggctacatgattccctgaaagataagaacaatgttatgttggggatattggtctctgggccaacctggtatcagcaccaacctgcagggaattgtggctgagccccaggtgtgtgggttcatatctgacagaagtgtcaaggaagtggcctgtgggggaaaccactctgtgttcctgctggaagatggggaagtttacacrtgtggtttgaacaccaaggggcaactgggccatgagagggaaggaaacaagccaggtaagtgcaccttatctgtcttgattattggtgagaatggaaagttggaggacacaatggcagagggcccagatggagctttctccaccaagtgttcggttttcagggaggctcttttgaacggtgcagggattccttcctgtttggaacccttgtgtctaattcaagccttttgatggaaaagcagacttttcttttcttttcttttttttttttttttgagatatggtctcgctccgtcgcccaggcttgagtgcagtggtgagatcttggctcactgcaacctccacctcccaggttcaggcaattttcatgcctcagccacctgactagctgggattacagacatgcgccaccacaagactttttattttttatcttcttagagaacatatgtaatatcagttacctggggaggggaggtgactagttagttcagagttagaataaaatagattttgcccrttgtattagtcggttttcacactgctgataagacatacccaagactgggcagtttagaaaagaaagaggtttattgggtttacagttccacgtggctggggaggcctcacaatcatggcagaaggtgaaaggcatgtttcacatggcggcagacaagagaagagagcttgtgcagggagactcccatttttaaaaccatcagatctcttaagactcattcactattatgagaacagcacaggaaagacctgcccccataattcatttacctcccactggatccctcccataacatgtgggaattcaagatgagatttgggtggggacacagccaaatcatatcatccagtaatttaatgctgagaaatatgacagttttttgaataggtaatcctcacacaatcactatcagaaactttacttcctgattacctatattcattcctttgtttctgcaacatgctcttacatgttttgtgctaagcaatgcgattgctgttatgagtggagggatgaatgagatatggtgatgatgtggctgcagtgatccttatggcaaatgctgtcatgcaagtctgtgttatgtaagttgaagagtacaccagaggtgtaggggaggggagattggttctgcctttgggtgttgagtagcactttggtgtgtgtgtgtgtgtgtgtgtgtatgcatgtgcacttgggtgtatgaatgaatgtggcagcatcactaagcttattgcacacctgatacccagtgatgtgaatataaaggtgcaatacttgttcaaggcatgttgaatagtgtggtgagactgggaagagagggtgatggaagaggataagctggaaaggtagggggactaattygtttccttaaatttcagtgcttttaattgatttataacaggtgctacacatattttaagcttgttgattttatttttttccacctatttttacatttttttttgagacaggatctggctctgtcgcccaggctggagtgcagtggtgccatcttgagtcaccgcaacctccgcctcccaggctgcagatatcctctcagtctcagtctcctgagtagctacaactacaggcatgtgccaatacacctgctaattttttaatttttgttttagtagagacggagttttgccatgttgtccaggctggtctcaaactcttgagctcaagcaatctgcctgccttggcctcccaaagtgctggcattacaggtgcgaaccactgttcctggccctatttttacttttaaagaatctaagtttgactttcagtatatgtgtagcatggatttataaggtcctcttagtagtgaggatgtgtaaatgaatcttcttttggtgagaaattttaaggtagggtcttaaattgtgaccacatatttgtcacactagcataggtgtttgcccctttttttgttacctgccattcttttcattcaatacagatcattccagacactgaagcttcattaaagaataaccttacagttttttctagatgattttatcattttatttggcatcaatacgaattaaattttttctgtgacactgtctccctcttctctcacgtttattattcccttccatagtaagtgaccatgttccgtagtttccctgcccaaaatgtcagtgtaaatttataatcgttaatttttatgttgcccattggaaagagggctgcagggcttaggcacaattgtgaaggatgtgaagtgtggttgatgagcttccaattcctcattctttgccaccaggttccttcaggaagcccgctgtgagaaatgcaccaggcctactcatctgggggcagtaccccatgttctagtcaggggtttcttaacctgaggaccctgaaatcttgggatttcaaggaaggggtttgtagagtcatctacagatgaacaccattccatgtacagtgcactcaatactataggttttcaaattattctgttgtttactaaaatgaaaattcagttgaaaatgccactaattcagaaattagtaaatcctatttattatgtattttaccaattaatagaatacaaaggtatcatatacaactaccatggaggtggcaggaagaagattgactttttcaaatggtcttcatactggaacagattaaaaaccaagtcttctttcttttcctcctgttaaaactcacttgtgtctcacattaagctcctaaatgtgccctctgtttccctaggccagagccagtgtctaacaagtaatgcatttggagggtcatggcccaacagtctacattcagccaggatttaggaacttcattccaatgatctttgaaggacttgtacaactctagccagcctttgaagggagtattttgggaactgggaagagatctttctagtcctcccatggagacagcaaggttatggtgaagtttggaatcagataaaactaatggaggcattacatctctaatctaaaatgaggattatagtctaggtgtggtggcacacacctgtaatcccatcactttgggaggccaaggccagaggattgcttgccaaggagttggggaccagcctgggcaacatacagatgcaaaaaaaaaaaaaaaaaaaaattagctgggcatggtggtgtgtacctgttgttcctgctacttgggaggttgaggttggaaggtcacttgagccctggagatcaaaactgtggtgagctgtgattgcatcattgcactccagcctgggcaacagagcaagactctgtctcaaaacaaaacaaacaacaacaacaaaaaaccccaaaataaataaataaataaaaatggggattataatactctttcataggtagagtaatctgtgtaaatattgaatgcagtgtctggcagttttatatcatgcctcagaaattatgctaccgtgcagtttcaccatcccgtgtaaaggctgatactgtctctggagttacagggaaagaagcctaagctgggagtttgagaactgggatctagttttttatctaccaggaaataattgcctgtccctgggcaagtttcttcctatttctgagtcacagttccctttcctgtaaaaggagtagacttcctgttctaatcagatagttcttggtgaaggggattcacatgataaagaagacaccacaaaactgctggtagtgttacagacagagaaatatgttacaggaaaggggtcccgatccagaccccaagagagggttcttggctctctcaagaaagaattcagggcaagtccgtggtacaaaatgaaaacaaatttattaagaaagtaaaggaatgaaagaatggctactccatagacagagccctgargtctgctgattgcatatttttatggttatttcttgatgatatgctaaacaaggtgtggattattcatgcctcccctttttagaccatgtagggtaacttcctgccgttgccatggcgtttgtaaactgtcatggcgctggtgggagtgtagcagtgaggacaaccagagctcactctcgtggccattttggttttagtgggttttggctggcccctttactgtaacctgttttatcagcaaagtctttatgacctgtattttttgttgacttcctgtctcatcctgtgacttagaatgccttacctgggccaggtgcagtggctcacgcctgtaatccccgcacattgggaagccgagctgggtggataacgaggtcaggagtccgagaccagcctgaccaacatggtgaaaccccatctgtactaaaaatacaaaaattagccgggcatggtggcgcgtgcctgtaatcccagttactcaggaggctaagggaggagaattgcttgaacccgggaggcagaggttgcagtgagccgagatcacgccactggcactccagcctgggggacagagcgagactccgtctcaaaaaaaaaaaaaaaaaagaacgccttacccgtctgggaatacagcctagtaggtttcagtctcattttacccagctcttgtttaagatggagttgctctggttcacacgcctctgacggtagccagtgatggccaccctcttcccaccctccttgtctgtcttctctgtggcttggtcttctatcaggcagcctcactgcagagtcagttgctcagatatgcctcagtgcacaccttggtcttggaacttgggggagaggattcaccctggggtagcagctgggaaaggaagcaaaaacctcgcagaacaatgatagcaaagatctgtagaaggcatcataatgaatacatctgagtgcaacgagacatttctctagcacagcctcctgatgcagctccaaggagctaatggtaggtgttgctgggcctctggatgtgagtgagctctggcaaagcagccgcactgcgtctgtctgcatactgggtcagctggccctcagtcatcctgcagacgccctccccacagggytgagtgactgcaagaatcccaagctagaggtgtgccaagaaggctttgggattcagcctcggaatccagcccatgcttgtgatctaaatttggaataaggcaggctgtagtgtaaattacaagagattccagaaatttctgttgttggttaagcttgtctgttaattataaactccatagcagcttggaataatgcctctttgaatggaaagattatgtgggtgggtgcctccctctctccatttaactttttcgttggtaggtgtgttctaaatctggatatgatttgcgtttgtttttaatgagtgggaagaagagaatgaacttgttttctgtgtttgcttattgagaaccatgacctggagagctgctagacatggaagggaagtctgtggcaggcctagtttgttacaggtatctgttggtcttggcccacaggaatgctacccccaagtagcttctgtggtatttgggaagggaacatgatggaaggccccttccttaaaagaggatttttctgggggttatgggcaggtctgtgatttcarcttggtatcattgcccagattggttgactttgaaatatgaaggattttaaaaagtgagtgtatgactgttcctctaaggctttgagagtgtgaagaagtgagttgaaggagttaattccatggtggccaactccaagtggcttacagagttttgaacccaagtggcaaacttaagtttctttttcttgctttgcagtactggctgtgaayggagtaatgcctgaccatcaacacttactttgctgattggacttgttaatatttctagtcctagcagggtgtccaccagcatgggtatggtcatctagcactagtctggagsagaatttatttcattgccttgaaactttgtttcctgttaaaatgcaaacaaccctgggagccacataatctgaccttcctgaggggaaggaaagttgaaagaaggtactggtgtaggagatgcacctggacaagtcttctaatgtgtgccttgattctgtcctgctagtcatcatataccatgttatacactctgtctctaactggttcagctgcaaggcacatcaattcatttttttgggatgcattctgtagatgtgccagagcagtgatataaagcacctctcagtgattctaagggttttggagatcctttttttccttcttaagaatatgtaacagttaactattgctgttgctgaccctgagactactgtggtttctttgtactctcatttctgtacttctcacattagcaatacccttatgtgaccaactgtgtgtgtgtgtgtgtgtgtgtgtgtgtgtgtgtgtggtaagaaggaggcatttcaaagatacatcaaattctgaaactcctggttattcaggccccagatattttcccagtgtgtcaggcagcacacagagttctagcttaggtgtgtccatgactcatttgtgatttggccaagggcatagaggcctgtgattcccagaagcatttttcagatgtagtatattaagccccatctaaactcaatttccagctttaaaaaaaagtattggattataagtcttttgcacattcctctctcacatgacttttctctccttcattctcacctttgcattcagacatatacctcatccctccccgacaaagcagacagagtttttgtgattggagtcatcatagggttattactaatttccttatggtttttgtccatgaatttattttataattttctaagacataaagttacagagctggcattttaggaagtcttgtgtgccttccccactttttttttaataaagcaagcaaacaaaacataagcttttttttcctgaatgttattttttataagtgactaagtggacattaagtaaatcttgagctcttttattaaactagagactggttgtccatagaaaggattcaataaataccttaatttaccatgcctctcatattcctacctagccacattgtaaacagtactcttcagctaaatgaatagttctcctttcctcatacatactctgatttctaatattgggattttagggtaagctaatctctgtgttattagggatatctgaacttacataagtgtcttctaatctttctccctatcttgaatagacaagaaccgtggtaggggcagttatttagtgtaatctaatttgactctgctaaattttaaaattctctgtagacataccaggaaatcttcttatagcagagcccaagggtaacaatttataagcaagctctaacatttctgtgcaactctatttgattcatctctgtgattggttccttttactttctcctgagttagtttccctcttgcaggtaatttaatccaattcacattcgcactttgtattcagtctaagcatttccctaatgcccatcaccatatgtaacagctttcctgctgtttgataaatgaggtttataaagcagaacgtccaaaagcttcaattcccaaactgtgcttgcttctaaccatggtagaagtaatgctttcaaccagcttctcaggttgctctcgggcatctgaagggcgcaataactctgtcatgttaatcagctcttgctgaaaagcaaaccagctgagctgaaaggaaatagaagggaccctgtaatgacttcctgttattgaagtgcgtgtttctatgggcataacgctgatataaaaggcagaatgtgccataggaagtgttcagatctcaacattgcacttgttagggccccatctgttccttattaggaatggcaggtggttcaggaggctgtgcacccctttctgattttggtgataatggttataatcaaaactagtaggatgtcttgcctcctttgatagctaggtagatgactttctggttcagaggtctaaggatcaggagaaactgtcatttaataattttattgtgggataattgatcggaattttttttctgtctgatactcagcctacattctataaagatacttgagtgttttagaaaatgtgtacttattaatgagcatacttgttagtgtgaggtatttgtgacttttaaaaacctgcagtattacttttaagtaattaacaaaatggtttgcttcgtgaaacaagaattttagttaatttgttaattataaaagtggttaatgatacatatataagctctctttatttctgatatgcttagcatttttaagctgattaatcctcatgatagctttgtaaagtaggtcagtattattatccaaggtatatgtaaaggaggaaagaaaagggagttgagtttgagtcttgcttaggtactgacagtttgggtttaataatcctagaattttgttcacagacatttttgtaacctcaggctgattgagaatggctgataagattttattgtcaaacttgtttacatttaatttccactcagtacttattaaagaaacaaaaaagatataaacttgcccacccagaagcttgtattccttaatttattgtttaaatacaaatatgatcaaggtactttggtaaaaggtactaagaaacaattccctttttatcttgaaacccattagactactgtttgtcagctgcctttttaagctcttttgagcaccaaataaaaagcacacatgataattcatatttcaggctgatgtattttgtcttgctatttgcctcttgttctttgtttttttattttcttgaattatttacttcttattcagtcactgattcagcagacatttactgagtgactaaacttstagattcctcatttgttttaaatactcttacaacacaacaaattagtgcagatcccaccctttgggcatttatagaccaggtgagaatataagatatacccaaaaaggttatatcctgcagttcagcaggtgtcaaacaggtgatacaggtcctatgtgtgtcaaaataagtgtcctgcagtgaagagataggtcaccaacagtactgaattctgaattctaacaaatgtcatcttctatacctacacacattataaggttcacatttatcttaagtttgtgagcttgttggaggagcgaattgtaacattttggagaaggggcagctttggagatggtttcaggattctagggatgttcagcgatttttgtaaatccaccctttaattctgaatttttgtgttacaatagcaattttttagtttggcaattttgatgatttcatctasgttggtgatctrtgatctttatagatctggggtaggtagaatgttgtagtttatcagcctgaatggggtatatctggtcagctgatattttacatctcttcaagggctactggaattctttgtatgtctttttgagtgaatgccatttgtgatagcatgtaatgttgaaatctttgataaccctctaacagatgtatggtctcatatccttgtagactttccatcattttttcacttattattaaaatatgcattgaaatttctattataattattaactgacttgcaacaactgaaatcatgattgtgaataattttaatttagagtattagctaattatggaggcagtataatgaataagagcatggactagctgtgtgacttggagaaagttgcttaaactctacatgtcttagtttccttagttgtaaatgtagataataatgtctacttattagggttgtgaagatttaatacattgcctatcagatacttggaataatgcttggcttatagtaaacactcaattagtactagctattattatttattcttatttttaatttgaaaaaataattgctgatctctatttcattccaattttagtgtatatgctgccaaagcaagtactagctattatcattatttgtagtagcagtagtagtaatttgtgttgacacttttcattacaattgtttttatcctgctattccagcatattaacaaattaatacattcatgacaaatacatacagtttctagatgtatacaaacatatacatctataaattgtgttggtcacttttatagattcccttaatactacaggatctgatgaatgatatggacattcagctgaggaagatgttataagttagggttgttaagggagagtttatattatgttcatttttattttaggttttaaaggataagtctattttctttattgttaatttttgcagttctttactttattgttctcatgaaaagtaccttacatatgttgggtacactgtaaaactgattatccacatatggacatgcatacatacatcttctctctatgcaattgttaccattacttccagcattctcatccaaaatggcaaagataagggaatcaaattaggtcgctgtgggcactgtggtacaccagggactactttatggtgctcctgaaagtcttgtagtggtttggcaccagttagctgggtagtatgatcttgtcataggcttagtaaatagagtgcaatccactggctcctagcccagctgaaatctttgggcagttactgtagacttccagttagctgtgatgggggtgaatctttggatggagagataaatgacctgaaagaatgcaagtgattttcctttctgcatccttcagttgcctaagaagagctcactctggagtctaaacctacatgatctctgtttttgtttgtttgtttgtttgtttgttttagtggtaatgtattagtcgctatgcttgcagtttcaagtaacaacagaatgctaagctgtgtcatgaacaatgagtaaaatttatcatctcacatgagaagaggtatttctaggataggctaagtcagtagcacagttgcctcatgtgtttcccatctttytgttytggagtggaattttgtagtgatgcagagatttattcttcctgccaaatctctagcctactagtgtgggtgtaagatttttytgggcctcatttaaagcctgcatatattccccaagtgctttaccagccagggtcagccttgccactatgccatgtttttttgggcgccagaattggcttgttatgttgaaagtattattttctctcatgatatttttctcctttagtacgcttcactattgaaatgcctgtaggcccagcttcccaggagtttgaggccagcctgtgcaatatagtaagaccctgtctccaaaaaaaaaaaaaaaaaaaaaaaawagaaattgagaaccttcyctgaggacaagtcacaacagcatctcagcctgttgactctttttgggagttgttkgtactgctaggaagagggttataaggttctatctcattttcttcttttcaaagtcatactaataagagcttgcagagagcccttaacaacaacaacaacaaaaacaaacaaaatccccaacattttccacttcaaatagatttgtgattagtttatcacattaaaggagtctttaatttattggtttggaattggcctcatactatatgaactgtgctgatcatgatgaaattaagtagattgtgctgattgaaacagcaagttctacattctgcctatacacagaggctgtttgggcacaaagtcaaaatagggaggctgggtgcagtggctcacgcctgtaagcccagcactttgggaggctgaggcaggtggatcatgaggtcaggagatcgagaccatcctggctaacacggtgaaacctcgtctttactaaagatacaaaaaattagcagggcgtggtggtgggcacctgtattcccagctactcgggaggctgaggcaggagaatgacgtgaacctgggaggcagagcttgcagtgagccaagatcgcaccactgtactccagcctgggcgacacagcgagactccgtctaaaggaaaaaaaaagaaaaaaaaaacagggagtgcagaaaagtggggaccattatgcccttaggcagcaagtcccctggtttccctcaaggaagtggaggcagcaggcaggcagtgaatgctgggtctcctccaggacgagctggaagcgaggatgttgagaaaaagctggagagaaaggaacgataggaaaatggagataacagttgtgctgaactcaccaggaggcacaaatcatgttctcctttcccttcagatgagggaagaaggctgaactaattatggaatgtttttattttctttgaggtgctatgtaatagggatacattaaaccaggttagccatgaataagaaactggaagtttattgcaatgtctttatgagtgccagcctgtgctttattcatctttctgttcttcatgactccctaaggtagcttttaaagtagaaaagcaatggggaatgcctttagtatttgcagtgtagagatattagtggtgaatgggcatatagtcattctggctattagaggctttccactgatcacagagggtataattcrgattggctagctacctttctcctttcttctctacccttctaatttgtcataaagcctttgctactctttcatatagagtggaactcatctttggtcaaggatttgtaaagagctggtttttttatttctgaactgataaaatgtgattaggagtgggaaggggtgggtcagtgcctggtgaggaaagagagatgtttcccttaccccagatcactggacgtaggttgagtggaaggaaggtaccagtacattccacctaaggttgggcaggacctctgtacccacagaattccttttcctcagcattttgtgaactcaagaaaaacaaaacaaagtcatgtttcatctccttactgccacgcttttgttaaaccactttatgaattaccatttaactgccttgatttagatattttgggtcagaaaacaactaacactatttttaagtttgttcagtttaaatgaaccatcagctttggcaggccacacctgttccagccaaacagaggtgtctggagaccttcttagactgaccttgtgtgtccagccaggggagctgtagtgcctgtggatggagttaacccataaaattgcatgacagaaaagactggagggagccagagacttcagaatttattcatccttttctgtttttagtttgtttgctctgtgttccttcctgtggctggtcatcctggcgaggtagagccacaggccaagaaggagccatgtcttgaattcttttcacgttttctgttgttcctcttcccttagatcattcttgactctgaatattatatgtcactgctctgtgtaatttgcatatttatataaagtactaggacactttgacttatttttagtcaggctttcatgcagaatttatttctggtcaagactgcatggctgcccaggtcagtcaggcatatgataacagggcatttcagtgggaaatgatgctttacttaataaatggtgttggtataagtggctgttcacctggcatacagaactagactccctacctctctccatattctaaagtaaattccagatgtatgaaagacatgaatgtaaaaagtaaaactataaaaataataggaaaaaaaattaggggaatgtgtttacaaccgtgagggtttcaacgtggtcctgaagccataagrgaaatgattggtaggtttgcatgaaattttaaaatttcctgtggcgtaaggcatcccataacgaagccaaaaggtgagtgatagactgggagaaataactgccagacgttgccagacaaagatttcatatttctaatatgctagagtacctttaatttgataagaaaaagataagcaatcctgtaataaaatggacattttacaaaggagtgcttgcaaatggccagtgaatttatgcaaatatgttcagggaaataggaatgaaaacgagattccactttttcatcatccatttgattggcaagaaatttttaaaagagtaatacctagtgatcactcatgtaggaaaatgggttgtgctgattgagcaggtgtgagctgctaaaatcttgtaatacagtcaactggctgttttagtaaagttgaaaatgttcataccttttgaatgaacagttccatttttaggaagcttatgcaaataaaaatgttaatatatagcataaggaaatgtttctaagtatgcttattgcagcaatgctgttaatggcaaaataacagaaatagcttactcatcctctagggaataggttgaataaatataacgggtcacaagataaagttttaagtagcatctttatactgttgactcacaaattatcttcagcctcaactacttaatttcagacttgatattgacttaaattctccacttggatatgtaattgctaccttaaacctaacatattcaaagcaacactgttttttctcccttaaacctgtttcttaccctgttttcttcatctctgtaaatggcctttccattcttcaggccaaaaaccttggagtcatccctgatttgtcttgtcttcttctctcacattccacatctaatttttcaagaaaacccccatctacataggatctgtcttgagaatatatattcaggatctcatacctcttctacccctcttcctgcctctctggtccaagttaccatcatatctcacctggatcattgcagtmatttctaattgttgtgcctgtttcctcccttaatccctctctccacagagtaatcatattatccctctccccaaaatcttccagtgctttctcagctcatctcttatggctcttccctggcatactctgttcctctggcttcattggtccctcctcagagtgtttaccctgctattctgtaacttgggaactatctaggacctatgttcctctggttcctatatgcctgatgcttttattccttcaggtctctgctcysatggcaccttattagagatgcctccatttactaccctgtgtttcctacccttcccagcactgtatcccccttccttgctttgggcatttatccctatctgatattattcagtcagtcacaatcaatacctctcttacctcttttgtttgtttaagctccacgagaataagggcattgttttgtatcctcaacacctagaacattgtgtggcacatagtgagtgcagctttcagcaagttttttttttgagtyggagtctcgctctgtcacccagctggagtgcagtggtacgatcttagctcactgccacctccacctcctgggttcaagcgattctcctgcctcagcctcctgagtagctgggattacaggtgcccgccaccatacctggctaacttttgtacttttagtagagacagggttttgccatgttggccaggctggtctcaaactcctgacctcaggtgatcaacccacttggcctctcaaaatgctgggattacaggtgtgagccaccgtgcctggcctcagtaagtattttttggataaatgaatgattatattgtgaaacaaaaactttctaattaaggagtatagaatcttttttgtttgttttacaaataaaatcaagcccaaactctattttatagaattattttcctttaatttttccttcctatgtctggtatgtggaattcatttctagacaggatcacacagtttttgctgtcaggcatttgcttgatggcctgtagtgatctgcatgtcttacatatgtgaagctgaggagaaagaaaggtcacccctagaaattctgcctgcattactgcagcaggtttgtctgatttgtgaaattggttggaattatgccagtggtgctagggacacaaatatgttgaatattgacatcctacagtgtgttaattcccttacctaaatatgtataaagtttyttttataaccctaaaactgtaagtattctgaaattagaagcaatgtgactatatctgcagtagatagttgtacttgcatggccatgacagcctgtgcactcaagtttggacccatcctccactgtgacacatttttgttttataataacagttattgagatacaatttgcataccacatgatttacccatttaacatgtacaattcaatggtttttagtatattcacggagttgtataatcatcaccacaatcaattttagaacattttcatctcttcaaaaagaaaccacccatacacattagcagtcacttacctttccccttcagccctggacaaccattaatctactttctgtttctmtagatttgcttattttgaacatttcatgtaaatgagatgatacgatatgtggtcttctgtgactggcttctttaatttagcattttccaggtccatccatgttgtagcatgtatcagtacttaattctttcttattcccaaataatatcccattgtatggatataccacattttgtttatacttttatcagttgatagacatttgggtggttttaggtttttggctgttatgaataatgctgctgtgaacgtttttacacaattttttgtgtggacacatgttttcatttctcctaggtatgtacctagaagtggaattgttgggttatatggtaactctgcgtttagcctttgaaggaaccttcagattgttctctaaagtgattgcrccattttaaattctcacaagaagtgtatgagggcccgagagatctttttaaaatgtagatctgtttggccgggtgtggtggctcacgcctgtaatcccagcactttgggaggcagaggtgggtggatcacaaggtcaggagtttgagaccatcctggccaacatggtgaaaccccatttctactraaaatacaaaaattagctgggtgtggtggtgtgtgtctgtaatcccagctactcgggaggctgaggcaggagaattgcttgaacccgggaggcagagatggcagtgagctgaaattgcgtcactgcactccagccttgtgacagagtgagactccatcacaaaaaaacaaaaacaaaaatgcagatctgttgataagagtgcctatctcatagggttattgcgaggattaattgagataaaacatataaagctcttaaaacagttcctggcatgtagaaagcagtcagtaagtcctggctattattcttattattgatatagtgggtgctctatgtataagctagtttcttatgtaatgatgaaacttaacatcagattcacctgggcaacttcagatttctggtcgtcctgaagtttttgatgcaagtggctaggatggactcacatcagtcatgtttgttcagaaaaagtttcgcaagggattctgatgctcattttttgttgtgaatcactgctttaaagattccactctgggcgttgcctctaggaagctgtccttgggcctacttaggctggtttgattactcatcctctgtcctcccataatgtgctatgcataattttgttactgggtttacctcactatactgtaatttttaaatctgtcatctgttatagcctttgagtcactttggatgaatgaatgaatagctcattatcactcaaggcacatcttggatattacctcttccaagaagcctttcctaactctctctgtctcccactcgcagtctgggttcgttgtccctcacgtgggctaccattcaaacctgcatgtttcttttattacactattgtgataaacgttgaccatcagtacgtatgtcttgttttcctcgtcagtcaagggagcatgggtgcagaaccacatgttatttatcttttcacccctagtatttataaagaatcttgtatatgataaagcatatattttttggtgtgtatgtgctttattattttaaaatcaactttatttagataatttacacgcagtaggagtcaccaattttaaatgtacaatttaatgagttttgacagtcattgaatcaggtaaccactaccacaatcatgatagcatttccatcacccccaaaacttctcatttccctttatgtcaatttaacatccacaccaactgttttgttccccctgcttttttgtcactatagttttgacttatctagaactttgtataaatggaatcacatattatgtagtcttttgtgtctggcttcttagaataatgctcttgaggttgatccacattgttgcacatgtcagtaggtttttgtgttttattactgggtggtattcccattttatggatagagtcaccagttcatggacatttgagtattttccccmgttttgggttgtttcgaataaaactgttatgaacattcaattacaaatgtttgtgtagacatatgttttcatttttcatgaataaactcmtaggagtgaattgctggttcatatggtaagtgtatgttccattttataagaaactgccagtaatttatgagagttctagttgctcctcagcatcacttgctattgtcagtcttttaaattttagccatccaagttggtatgtagtggaatctccttgtcgttttaatatacacttccttaatgactaatgaacttgaacagcttttcttgtgcttatttttgccatttgggtatcttatcttttgcagagtgtatgttcaaatatatgtcctttaaagaaaaccaaattgcttgtcttacaatgttctttatgtggtcagtatactgatcttttatcagagagatgttttacaaatatttccttccaatctggttttccttttcggtttcttaacagtgcgttttgaagatcaaaagtttaattttaatgaagtctaattttcaatttttactttcacagtttatgctttttgtgtcctaagaattttacctaactcacagtcgtaatgattgttttcctaagttttcttcttgaaattttatagtttagctcttacatttaggcctatgatccatttcaaattaaaattytatatgtaggtgatataatggtcaaggttcgtttttttgcatatggatacccaattttcagcatcattattgaaaagactgtatatccccctgctcccttgcattatcctggaacctatggaagacagttggctgtgtgtgctcgtctttttgtggaccctgtattctgttcatctacatgtctttccttagtattacactgtgttgattactgtagctttatagtaaatyttggaagtatgtagttgcagatagtataaattctacacctttgtttttatttttcagaatttttttttggctattcttggtcttttgattttgcatgtaagagcagcttttcaattttggaagaaaagctactgggattttcattagaattgcactgaatctgtggatcaatttggggagaatttacattttaacaatgttggatctttcgattcatgaacatggtgtgtctctctctatattttaggtcttctttaatttttctcagcaatattttttacttctcagtatacaggtcttacacatgtttcattttaaatatttcattttttatgttayacatggtatttttaaacaatctttaatttctagtattttgttagtatttagaaatatgattgatttttgtatattgatcttgaattactttgttaaactctcttattagctctattagcttttttctgtatagtcttaggattttcataatatctataaatcaagctgtgtgcctattatttcattttcttgccttatttcacttggcttatttcactcatttgccttattttactggtatagtaatgaatagaagtggcaaaagtgtacatcctcaccttgttcctgatgaataggaaagcattcatctttcaccattaagtgtgatgttaacagtagggttttcatggatgtcctttatcaagttgaggaagtttcctgatatttagtgatttttttttaaataaaaaatttgtgttgatttttttcaaatgttatttccaaaccttttgcagtgattgtgtggctttttattttcagtctgttaagatggtaaattgcattgattatgtttgagtattaagccaacctctcattcctggaataaatctcacttggtaatttttatatattactgtttttgatttcttaaattgtgacaaggatttgtgcatctctgtttatgaggcttatcagttttcttgtagtgtctttggttttattattagggtaatgctggcctcatgaaatgaggtgagaagtgttccttctattttctagaagagtttgtttatgttaatttatattctttctttctttccttttccttcttttcttttctttttttgagacaagatctctcaaaagtccaaggctggtcttgaactcctgggatctagtgatcctcccacctcaacctcccaagaagctgggactacaggtgtgcaccactgtgcctggctccatgtttttattacttatagacttattrtagattattatttcttccttaaatggctggtagagtcactgttgaagccatctggccctagagctttctttgtggggatattttattttactttattatttgttttttcagctttattgaggtataattgacaaaaatggtatgttcaaggtatataaggtgwcattttgatatacatatacattgtaaaatgattatttgtggagacattttataatttcaatttctttgaaagatataggactacttatctttttcttcttaggtgaggtttcttagttcatgtcttttgaggaatttgtccacttcatctaagttgtcaaatttgttgacataaaattgtttataatattcccttatcctcttagtgtctgtaagatctgtttttctggtatagcacttgtatcttcatttcatgattagcctgggtagatgttaataaattttattaatctttttaaataataagtttttggtttcaatgatttttattattctttttgtttgttttgttttctgtttcagtgatttttgctgttaattattttcttctgttcactttgtgtttaatttaccgtattgtttctagtttcttagtgtggaaacctaaatcactgatttataacttttcttttattctaacaagtattttatgctaaaatatccttttaagtatcattttaactgtatcccacaaactttaattccatgtgtttttgtttttatttagtttaaaatactttgtaataattcctgtatgatttcttctttgacacatgggttatgagaagtacgtagtttaatatctaaatatgtggcaattttgctgttatctttcatttaattatttctagtttaatttttctttcatcagagtacagttagctctccagatccacaagttctgcatcatggattcaagcaaccacagattgaaaatatttaggaaaaaaaaattacaacaataaaaataatacagattttaaaaacaatatactattgttatttatatagcatttacattatattaggtattataagtaatttagagattatttgaagtatataggaggatgtgtgtaggttatatgcaaatactgtgacattttatacaaggaattttatataaggaatttgagcatctatggattttggtatctatggggggccctggaaccaatcccccacaaatactgagagacaagtgtacatattttgtatgatttcagtcctcttaaatttagtggccgggcatggtggttcacggctctaatcccagcactttgggaggccgaggtgggcatatcacctgagatcaggagtttgagaccagcctggctgacatggtgaaaccctgtttctactaaaaatacaaaaaagtaggcaggtatggtggtgcatgcctgtaatcccagctacttgggaggctgaggctggagaatcgcttgaacctgggaggcagaggttgcagtgagctgagatcacgccattgcacttcagcttgggcaacaaaagcgaaactccgtctcaaaaaaaaaaaaaaaaaaaaagaaaacttatctgagatttgttttacggcccagaatatggtctgtcttagtgaatgttctaagtgcatcaacgatcaaaaagaatgtgcattgcactgttcatgggtggagtgtatttataaatgtcaattagttgaagttggatgatagtatgttgttcatgtcttctataccttactaattttgtatctgcttactgtattgattactgagtgagtagtagtaaaatttttgattaccattgttgatttatttcttcttttggctctataagtttttgctacatgaatttttaagctctgtagttagtacttacacatttaaggttgttcggtgttaatgagttgatccttttaacatcaagaaatgttactctttgtccctagtaatattcgatgttttgaaatctaccttgcctgatataaataactttagctttctcttgattagtattagcatggtaatctttttctcaccttttaatttttctaccttttatttacagtgggtttttttttaaaaggcagcatatagttgtgtctcccacattcatccaacctgactctctcttttctagttggagttcttatatatacatatatttttaagagaaaaattgacagaagactgcaatttcagagataaaatagatggatcccaatgcagggatgttttgcctgcagtgataaaatgttatcatattatcaaatgtttcacatttgctgtagaaattgagtgggattaactatctttagcaagcccctctggaagcatctcatcttgcattataatctatagcgatattgtttgtaaaataacatacagtttaaaatagtataaaacaatctgcaggcttgggaatgacctcttacttaatcacattgaatgaatgtggtctgaatagttgaaaaaattgtgaatagaggagggaagtggtaagaagtcctttcaaaaaccttaaaaatagggctgggcgcggtggctcatggctgtaatcccgggacttgggaggccgaggcggttgcattgcttgaggccaggaatttgagatcagcctggccaatgtggtgaaacccgtctttactaaaaatatgaaaattagccacatggtggcatgtgccagtaatcccagccacttgggagactagcttgaacctgggaggtggaggttgcagtgagccgagattgtgccgctgtactccagcctgggtgacagagtgagactctggctcaaaacaaaacaaaacaaaacttaaaattaattccacattacaaaagtaatacatatgtgtttattgctcacaaattaaatacctgtaaactaaaataagcaaataaattctctttaattctaccactctgaacaaaaacaacattggtatttctttggtttatctttccagtatttttyttaacagcaatgtaatttttaaaatgaggtcatatcagaagtaccactttataacctacttttccacttactatctcataattttctgtgatggtcatattcatactgatctgtatcaacctttttaatgactacatatttcattttataggatataatcctagtttctaatttttttcctgttaatgcagtgtacattatttctttaggatatatttgtagaaatacaactgctagatcaaaagacattcaaaattctaaggctggtggtatgttataaaaatgccagccttaaagtttgtactgatagrtagtatactaacattgggtgtaacttttttgggagaaatagattggatttgtatcataactttaatttccagttcttcatttttttgaaaggctaataaacttatctctatatcttttggttaatcaaagataatttttatatttattaccaacagtttaaatgcaaagtcaaatatggagattttttacatagcctctttttgtaaagaattggagtggtgagtatttgttgtgattttacagttaaactatgtcagcttctcagtgtgtattttgtgacttagtatagagagctttttattcttttttaggtcagtctatgggtattgactgccttccaaggaggccaaagttaaaatatttgagctctaagtaggcagartagtaccagtgaataagtatagcatgtggtgaaaattgggaggggtagatttttattctgagtgagaataaatcttctgtttatgttagtggatctagcacagattaatttattttctaaatggacctgtcttgattctgttacttctctgatattgtacccttggaaaatgttttagtttctccattattctccatttctcccataaagaatgatgatgctttgaaatgtctgtgagcttccctagtgatttagaaatgaaacagtttatgtttccccctcctttgatatgaattatagcactggaatttgtgacttttttggtagtcatttaagatattttaaagcctgactttattgattttgattttgattattacagacattttatagtcaacaagtgttttctagcatttctttaatgttatacgcttgcattaagatacatgaaactgccttcctggagcttacactctagttcttgtatgtacccaagcaggccgtggttgtatggaagccggtgctgtagttttacagaaaaggaaagatctgtgaaggataaagcattcatgatagcatgtgagctgaactttgaagggactattagtattttcacctgagaattatgatttcagtcctcttagaggagtcttaaattattacctggaggatttatgcatttaactataacaaaattatatatactactgtagcaccatgcaggggacctctctgtttttaggatttcctctgtcagaacccataggtggttttctaatttttattctttattaaaaatccctttaaagcattagattatgccayggttggcaattctgagttcctgaaaataactgagtcattgcagctgatcttattctgactagtggaatgctagtgactcaaaactacaaagtctactcccctcccattccctgtgacagggctccatatgttattattgacttcgtcagtatatctagcttattgcatctgaaagcatacatagtaaatttagatttatggctttaagaagaacwtatattcagaaacatttttcatagtatttgttttagagttttgtgtgtatacattaagggccaaggttaaagtcacctgtcactgaactgagaggtactactctgggccaggcatggtggctcacaataatcccagcactttgggaggctgaggcaggcagatcacttgaggtcaggagttcgagaccagcctggccaacatggtgaaaccccgcctgtactaaaaatgcaaaaattagccaggcgttgtggtgtgtgcctgtagtctcaactacttgagaggctgaggcaggagaatcacttgaacccaggaggcagaggttacagtgagctgagattgtgccactgcactccagggcctgggtgacaaagtgagattctgtctcaaaaaaagaaaagaaatactactgtaaattcttatcataactaatctttctctctgattctttggttgaaaagatttggcttaatgattgtttaaagttggtcagtaatacttggtattaagcaagtgagtgtttgatatgttcagataacttaaatgaagcattagatgctcatggatactctctacttccaggaatctagccctttactatatggaaagattaaacccatatttagtttttgaaacattcatgggagagctgtgcctttattttttcatttagccaaattgaacagtttttggactttctctgatgtttaaaaggacacaaagcagggagaaaaaagtcttatttaaaaaatctggccctgagtttccagttctgggaaggatggataagtacawgccttcctgtcttcgactgtatgcaactataaaacctggacagaatgcctggagcgactatttgataactctgaaaaacaaatagtggcaggcacattgggaaagaagaccagaacttgaagtaccactaagctggcaatgagwttaccattttttcccctcttatcatcctgccatttggccccagaggcagaagtccataggctagaggactaaaaaggaaccccaagaaacctggaagtatttgggagatcacagagagcccatgaatgcaactccatatagttatccatgaactctttggctcacctctgtgttctgcatgcgtggatttattctacttagcatataaatgatcttgagagctgaactaatagataaccactcagactggccactctgtggtgtacgcagggcacacatctgaaaagcagtgcaaaggctttgaaaactaaaaattgttaacattccccagaagacccagaatcttgtaacgtaatatccaaaatgttcatggtacagtccaaaattattcagcataggaaaaaccaggaaaatttcaacttgcatgggaagagacaatggatgccaatgtgggataatgtagatgttggaattatctgacaaactttaaagcatgtagtttacaaatatttcaacaagctggcccaaatacttgtgaaacaaatggagaaacaaagttctcaggcaagaaatagatgatgtgaagaggaaccaaataccataactaaaatgagaagctcactgcatggcctcagtagcagaacagaggtgacagaggaaagaatcaatgaagttgaagatagatcagtagaaattatgcagtctgaatgacagagataataaagatgggaaaacaaatgaacagagtttcagggacctgtggaatgagaacaaaaagtctaatatgtctttagagtcccagccggagaggacaaaggatgtagtgcaaaactggaaagtttccaagttggcagaagacataaacctacaaattctagaagcccagtgaacccaagcaagataaacccaaagaagcctgcattcagacacatcataatcaaacttctaaaaattaaggcaaagaaaatacttgaaagcccagagaaaaacaacacattacatataaggaaacaatgattcagaagactgtggatttcacaccagaaaccctggaggccttaaggaagtggcatagcagagcatagaaagaagagaattgtaaacttagaattctgtatccagcaaaaatagcctttataaatgaaggtgaaacaaaggcagttttaggtgaaggaaaagtcagagaattcaactagcagggctgtactaaataatagcaaaatgaagtttttcagacagaagggaaacgatatcagaaggaatagtggcacatcaagaatgaagaagaggaacagaaatagcagatttatctgggaatataatacactcttgagttctccagtatatattttatggttcaaagcatatttaagattactgtaacttaaaggggggatggtaaagtaacctatatggtggtagggtttcttccrtgtaatatattttgcattgtaaaaatgttgattctaagtaagctctgaaaagataattattgtaattcctggaacaatcacttaaaaagctataccaagtaatatagtagaaaacacaatagatacattaaaatggaatactaaaattatttaacacaaaagaaggcaagaaagaggaaatgagaaacaggaaataaaacaataacaaaataggtaaaaatccaaatatagcaatgattatattaaatagaaatagtctaaacaaaacaacccaaatagattatcctattagactctaaaaaaaccccagcaaattactgtgcataagaaattgacttcaaaaataatgatattggaagattattaaaagtaaaagaatacaaaacatatattatgcaaacactaatcataattaacatttagtgagtaaagcttaaagtaggcaaagaaagtgaccaggaatacagaggaatgttacatagtgattaaatggtcaattcgaggggggcggggccragatggccgattggaagctcccatggaaaagatccaaaacagtgtattaatcttgcaccggcaaccaagatatccaggtttggtcattaggactgactaggcagccggcatgacccacggagaggaaggaagagcagtgtggtgcggcggcccacctgagagccacacagggcaggggagcccccacccttagctgagggaggtggttagtgagtgtgctacccagccttgggaaccgtgctttttccacggaactgtgcaacccacagatcagaagatcccactcgtgagcccatgctactggggccttgggtcccaaccatggagccgtgcagattctcactgggctagaattggcctaagccagccaaatccccaggggaaggggcagccaccaccactgctgtggctgcctgctgtctaagccacctacgctccttgtgggaggggtggcagccaacactgcagcttcagggcttccttgcaggaactccgtctccaactaggggctaagggacagaactctgatctccctrggcctgaacccctagggggagggatggccgtagtctctgtggaccagcagacttagtctttcctcctgcgagcactgacgaatctgggcagcccagatgagtgagtttccccccagcacagcacaccccctccaccaagagatagccaaagtgctttgttaaatgggccctgcttcctgtgccacccaactgggtgagaccccacccccgcccccgccaacaggggttgtcagacatcctatacaggagcatccctactggcatcaggtcagtgcccctcgaggtcagaggtcccagaggaaggagcaggcacccatctccactcttctccagtctcctcaagtgacatttccagatgcaggagtgaaccagatgaatagggcttaaagtgaacccccagcaaaccgcagcagctctgcagaagagggacctgactattgaaagaaaaacagaaagtaacaacaacagtttcaacaaaaaagtctccacaaaaatccttatccaagggttagcaggctyaaagatcgaaactagacaaactcatgaggatgagaaagaatcaatgaaaaaaacgctgaaaacccaaaaggcagagtgcctcttctctaaatgatcgcaacacctctccagcaagggcgcagaactgtacagagaatgagatggatgaattgacaaaaacaggcttcagaaggtgggtaacaacaaacttcgctgaggtaaaggagcatgttctaacccaaaacaaagaagctaagaacgttgataaaagattagagagctgctaactagaataaccagtttaaagaggaacgtaaacgacctgatgaagctgaaaaatgcaacgtgagaacttcgtgaagcatacacaagtatcaatagttgaatcagtcaagcagaagaaagaatatcagagatggaagactctcttgctgaaataaggcaggcagacaagattaaagaaaaaataatgaaaaggaatgaacaaaacctctgagaaatatgggactatgtaaaaagaccgaacctaagactgattggartacctgaaagagacagggagaatggaaccaagttggaaaacacacttcaggatattatccaggagaactttcctaacctagcaagacaggacaacattcaaattaggaaatacagagaattccactaagatactctatgagaagatcaactctaaggcacataatcggattcaccaaggtcaaaatgaaggaaaaaatattaagggcagccagcgagaaaggccatgtcacctacaaagggaagcccaccagactaacagcagacctctcagcagaaaccctacaagccagaagagagtgggggtcaatattcaacatttttaaagaaaacaattttcaacccagaatttcatgtctggccaaattaagcttcataagctaaggagaaataaaatccttttcagataagcaaatgctgagggaatttgccaccaccaggactgccttacaagagctcctgaaggaagcactaaatatggaaaggaaaaaccagtaccagccactgcaaagcacacaaaaatataaagactaatgacattatgaagaaacggcatcaattaccatgcaaaataaccagctagcgtcatgatgacaggatcaaattcacacataacagtattaaccttaaatgtatataggctaaatgccccaattaaaagatatagactggcaaattggatagagtcaagacccattggtttgctgtattcaagagacccatctcatgtgcagagacacacataggctcaaaataaagggatggaggaaaatgtatccagcaaatggaaagtggaaaaaagcaggggttgcaatcctagtctctgacagaacagactttaaaccaaccaagatcaaaaaaaagacaaagggcattacgtaatggtaaagggatcaattcaacaagaagagctaactatcctaaatatatatgcacccagtatgggagcacccagattcataaaacaagttcttagagacctacaaagagagttagactcccacacaataatagtgggagaatttaacaccctactgtcaatgttagatcaacgagacagacaattaacaaggatattcaggacttgaactgagctctggatcaagtggacctaatagatatctacagagctctccaccccaaaacaacagagtgtacattcttatcagtgccacatagcacttactctaaaattgaccacataattggaagtaaaacacacctcagcaaatgcaaaataactgaaactgtaacagtctctcagaccatagtgcaatcaaattagaaatcagaattaagaaactcactcaaaaccacacaactggccaggtgcgatggctcatgcctgtaatcccagtactttgtgaggccgaggtgggcggattgcctgagctcaggagttcagcctgggcaaaacagcgaaaccccatctctactaaaatacaaaaattagccaggtgtggcagtgtgcgcctgtagtcccagctactcgggaggctgaggtaggagaattgcttgaatccgggaggcagaggttgcaatgggctgagattgcactactgcactccagcctgggtggcagagtgagatgccatctcaaaaacaaacaaacaggccaggcatggtggctcatgcctgtaatcccagcattttgggagaccgaggcaagtggatcatgaggtcaggagatcgagaccatcctggctaacatgacgaaaccccgtctctactaaaaatacaaaaaaattagccgggcatgatggcggacgcctgtggtcccagctactcaggaggctgaggcgggagaatggcatgaacccaggaggcagagcttgcagtgagccgagatcgcgccactgcactccagcctgggccacagagtgagactctgtctccaaacaaacaaacaaacaaaaagccacacaactacctggaaattgaacaacctgctcctgaatgacttctgggtaaataatgaaattaaggcagaaatcaagaagttatttgaaaccaatgagaacaaagaaggaatgtaccagaatctctgggacacagctaaagaaagcagtgttaagagggaaatttatagcactaaatgcccatatcagaaagctagaaagatctcaaatcaacaccctaacatcacaactaaaagaactagagaagcaagagcaaacaaatccaaaaactagcaggagacaagaaataactaagatcagagcggaactgaaggagatagagacatgaaaaacccttcaaaaaatcattgaatccaggagctggttttttgaaaaaattaataaaatagaccaccagctagactaataaagaagaaaagaagaattaaattgacacartaaaaaacaataaaggggatatcaccactgatcccacagaaatacaaactaccttcagagaatactattaacacctccagcaaataaactagaaaatctagaagaaatggacaaatacctggacacatacaccctcccaagactgaagyacaggaagaagttgaatccctgaatagagcagtaaccagttatgaaattgagtcagtaatagataccctactaactaaacaaagtccaagaccagagagattcacagctgaattctaccagaggtacaaagaggagctggtatcattccttcagaaactattctaaacaattgaaaaggagggactcctctctaactaattttatgaggctagcatcatcctgataccaaaacctggcagagacacaacaaaaaaaagaaaatttcaggccaatatccttgatgaacatcagtgtgaaaatcctcaataaaatactggcaaaccaaatccagcagcacatcaaaaagcttatttaccacgatcaagtcagcttcatcctgggatgcaaggctggttcaccatatgcaaatcaataaacataatctatcacataaacagaaccaatgataaaaccatatgattatctcaatagatgcagaaaaagcctttgataaaattcaacatcccttcatgttaaagactctcaataaactaggtattgatggaacatatctcaaaataataggagttatttatgacaaacccacagccagtatcgtactgaataggcaaaagctggaagcattccctttgaaaactggcacaagacaaggatgccatctttcaccactcctatttaacatagtattggaagttctggtcagggcaatcaatcaagagaaagaaataaagggtactcaaataagaagagaggaagtcgaattgtctctgtttgcagacgacatgatactatatttagaaaacgccatcatctcagcccaaaaatgccttgagccgataagcaacttaggcaaagtctcagggtataaaatcaatgtgcaaaaatcacaagcgttcctatacaacagcaatggaaaagcagagagccaaataatgaatgaactcccattcacagttgttacaaagagaataaaatacctaggaatacagctaacaagggacataaaggacctcttcaaggagaactacaaaccacttttcaaggaaataagagaggacacaaacaaatggaagaacattccatcctcatggataggaagaatcagtatcatgaaaatggtcatactgcccaaagtaatttatagattcagtgctattcccatcaaactataattaaaattcttcacagatttagaaaaaactgctttaaaattcatatggaaccaaaagagagcccacatagtcaaggcaatcctaagcagaaagaacaaagctggaagcatcatgttacctgayttcaaactatcctacaaggctacagtaaccaaaacagcatggtactagtaccaaaacagacttatagacaatggaacagaatagaggcctcagaaataacacacatctgcaaccatatgatcttcaacaaacctgacaaaaacaaacaatggggaaaggattttctatttaataaatcatgttgggaaaactggctagcatctacggtaaaccaaaactggaccccttccctacaccttatacaaaaattaactcaagatgaattaaagacttaaatgtaaaaccccaaaccataaaaactctagaagaaaacccaggcaataccattcaggatataggcatgggcaaggactttatgacaaaaatgctgaaagcaattgcaacaaaagccaaaattgacaaatgggatctaattaaactaaagagcttctttacaacaaaagaaactcatgagtgaacaggcaacctacaaaatggaagaaaatatttgcactctacccatctgacaaaggtctaatatctagaatctacaaggaacttaaacaaatttacaagaaaaaaaaaaccccttcataaagtgggcaaaggatatgaacagacaattcagtaaggaagacatttatgcggccaacaaacatgaaaaaagctcaacattgctgatcatcagagaaatgcagatcaaaaccacaatgagataccatctcacaccagtcagaatggcgattattaaaaagttgagaaacaatagatgctggcgaggctatggagaaatagaaacgcttttacactgttggtgggagtgtaaattagttcaattattgtggaagacattatggtgattcaaggatctagaaccagaaataccatttgactcagcaatcccattactgggtatatacccaaaggaatacaaatcattctactaaaaagacagatgcacacatatgtttattgcagcactatttacaatagcaaagacatggaaccaccccaaatgcccatcaatgatagactggaaaaagaaaatgtgatacatatacaccatggaatcctatgcagccatgaaaaggaatgagatcatgtcctttgtcaggacattgatgaagctggaagccatcattctcagcaaactaacacagaaacagaaaaccaaacaccacatgttctcactcataagtgggagttgaacaatgagaacacatggacacaggcaggggaacaacatacagtggggccttttggtggggagcgagggaagggagagcatcaggacaaataggtaatacatgtggggcttaaaacaagtgacgggttaataggtgcagcaaaccaccatggcacatgtatacctatttaacaaacctgcacgttctgcacatgtgtcctggaacttaaaggagaaaaaataaataaataagatcagttcagcaggaaaacataggaatcccaaatgtgtgtatacctaacaactgagcttcaaaatacttgaaacaaaaacttacagaaataaaaggaaaaatagacaaatctaaaaattatatttggagactttttactcttttttgtgataaatagaactaatagaacatcatcaagaatatagaagtkcaccatcaaacggactagatatgattgatatttatcgaacattctatccaacagcagaatacacttttttcaactgcctatagaacattcaccaagatagaccatattttgagtcataatacaaacatgaacaaattttaaaggattgcaataattaaaagtatgttctctcactatactggaattcaactagaaattaataggagaaaaataacaagaaagtcttcaaactcttagattaaaattaagcagcagccttataaatmatcaatragtcaaagaggaagtctcaagggaaatctaaaaatattttgaactgaacgaaaatgaaaatatggtttatcaaaatttgtgggatatagcttaaagcagtgcttagagagaactttgtggcattaaaagcttatttagaaagaaaagtattcaatcaataatttaagccttcacttatgaaatgagaaaaatattaagagcataataaayggaagataagtacaaggaaagaaatagtgatgaaagtagaaattagtgttattgaagatagaagaacaatagagaaaatcaatggaaccaaaagctagctctttgaaaagatcaataaaatgataaacctttagcaagagagtcaaagagaacaaaagaaaacataagttcccagtatcagtgaaacagaggatatcattaccctgcaggccctgcagacattaaaagctttgtaatggaatctgacaacagttctctctatatacatttaacagcttggatcaaatggacaattcttccaaaaccacaaactgtcaaaactcaaccaagatgcaatagataatctaaataggttatctataactataaagaatggaattcatggtttaaagccttaaaaagaagttccccttggccgggcacggtgctcatgcctgtaatcccagcactttgggaggctgaggtgggcaggacacttgagaccaggagttcaagaccaggctggccaacatattgtatttttagtgaaactccatctctactaaaaataaaaaaaattaacttgggcatgctggtgcatgcctgtaatctctgctactcgggaggctgaggaaggagaattacttgaacccaggaggtggaggttgcagtgagccgagatcacaccattgcactccagctggggcaacagagcgagactctgtctcaaaaaaaaaaaaaaaaaaaaaaggaaggaagaaatctctagacctccagactcacgtggtttctctgccaaatgttatcaagcatttagataagaaatgacactgatgaaataaaatctgctttaaacaataggaaaaacagtctaaagaagaaactcacatggttatgtcagttgatacagaaaacagaatttgacattatgcagcatccatttatgacaagaactctcatgaggaacacactagaagtagaagaaaactttttcaaccttatgaaggacatctaccaacaaatcttatagctatgtcaaacagtgttggaagattgcattctttcagttcatttggggtgctataacaaaaatatcacaaacttgttggcttataaagaacaaacatttattcttaacagttctggaggctggaaacttcaaggccaaggtgccaacagatttggtgtctgccgagcactgtcatcctcatagatggtaccttgttagctctatcttcatacagtgaaaggggctagctagccagccctctatggtctcttttataagggcactaatctcaaccatgagggctttgccctcatgaccttatcacttctcaaaaggctgcaatacctaacaccatcactttggggttgatttcagcatatacgttttgggggattcaaacattcagaccattggacatggcaaggatgtccactctcactactgctattcaacatcatgctagaagtcctagccagtgtaataaggaaagaatgggggcggggggtgtgtgggtggcagggggaarcaaacamattggaaaggaagaaaaaaaaccatctctattctcagaaaaaattctttctattaaaaattgcagtgtctacattgaaaattaaaaaactattagttaaatttgtatgatttaaggtcaatacacaaaaatgtactatatctatatattaacgatatgcaattggaaactggaataaaaaatacaatttataatatttccaaacaaataaaatacttaggtataactttaacaaaacatatataagatttatatgctgaaaactacaaaagtctggtagaagaaatccaagacctcgtaactgtagagacatattgtgttcatggattaaggcccttaacgtattatagcaaatatttcagttcttctcaagttgacttatagatttaacacaatttcagctaaaattccagtaggattctttttttgtagatatagacaagccaattataatgtttatatgggaaggtaaaggatctagaatacctgaagcaattttgaaaaataygaataaagttgaaggaatcacctgattttaaggcttactatagaggtatagtaatccagggtatgtggtactgacagaggtgtagacgcagtccaatagaacagaataaagcccagaaatatatccacacaaatgtggttaattgacttttgatggaaatgtaaaagagattccatatagaaaggattttgttagttgtttttagcaaagggtagtggaacacttggacattcataccttaaaaaaaagaaccttgatctgaatctcacagctttttaaaacaattaactcaaaatgaatcacagatctcaatgtaaaatgtgagtcaataaagctttcagaagaaagcagaggagaaattcttcataacctgaggttaggcagagagttcttagacatgacaccaaaaacataatccataaaggaaaaagttgttaaagtagacttatctatgagtgtgttaagagaatgaaaaaacaactcaatagtgaaataaaaatttaattttaaaaattggcaagaacttcgaacagacatttatccaaagaggatggatggcaaataagcacatgaaaagatgtttgacatctttagccactagagaaatgcaaattaaaaccgtaatgaaataccattatacttgttagaatgggtaaaattaaatactgataatagcaagtgttggcaaggatgcagagcaactggaactctcataattgctggtgttaatgcaaaatgggatggccattctggaaaatgatttggcaggttttttctttcttttttttaaataaacatatatttaccacataacctagcaatctcacacctgggtatttactccagtgttaggaaaacttattgtcatacagtaagctgtatgtgaatgttcattgcacctctatttataatcactaaaaactgggaacagtgctctgtagttcatccattatacagtggaatactccttaccaataaaaggaacaaactgttgatacatgcaaccacttaattgaatctcagaggcattatgagtaaaacaatccagtttcaaagagttagacactatatgattccatttacatgacagcataaaaaactcaaaactatagtgagagaaaacagattgttggttgtcaggggttaaggatgaggagaggatgcaactataaggaatagcatgaagaacatttttggggtgatgggactgttctgtatcttgattgtgtttgaattcatagacttatttgtgtagttacatgtgtttgaattcatagacttatataccaaaaaaaggtcaagtttattctatgataattaaaaattttttgaagctgactctggtttcagtgccttggctcagaaacaagatagaaaatctcttatggaaatagtccagataccccaaaatgtttagaccaaagtaattaattaagaaataaattggaatatggctttggaaaaggacctttcagatacaggaacaaacaaaatgagggaaagagacttagtcatgttgtgggaggcagggagactctaggatgaaaattagataccaggccatcttctgtgttgggaactgcagaggaacttggatgtacaatattttgttttgagcggtttgccgagatacagtgtatctccatcacccagactttcaataaaagtctgctgcaccccacagactgggttgatagtattttggagaaaaagcagtcaggagagcagagtatagcagcaggaggaaagatgtgcaggagggtaagagttcggtgggaacaggaaatcaagagttagggtgaatgtgaggacttagaatgtgcagaatggtagggtgaagaactgggtttcctacaatatgtctctgtcttgttttctactattaaagaaaagtataattgtagagttgacaatttgcggaaaagcagaaaggagacatctaagtggtgaaagtttaaccctctttgtactatcaactgcttacatttattttgtgatagttttattaaaaacttagtgccaactgttaatcactaattttgtatatactgtatatagtagtccctccttatctgcaggggatgtgttccaagacccccactagatacctgaaaccttggatagtaccaaattctatatatactatgctttttcaatctgataacaggggcagctactaaggggctaacaggcagggagcatatacagcatggatatgctggacaaagggatggttcatgtcccaggtagagcgggacagtgagagatttcatcacatgactcagaatggtatgcaatttaaaacttatgagttgcttatttctggaaatttccacttaatatttttgcactgcactgatcgcaggtaactgaaactctggaaagcaaaacctcagataagggggaactactgtcctttctacccagatgctgatattatttactgtaagccattggatgtgtttctcgtgtgaacagacgatgaggaaaaagttagttttccattatccataaatagggtattcactttgtaggttacttttaccaatttaaaatctatctaattcttctccagaggaaagacaatatagcttagttaagtataatgggctttgaagtcagacagacctggtgtccatcccagttccaccaatcattagttgtgagccttggccaaattacatcctctttctgagctgaggacaacaaccctgtgcccttgccttacagggttgttgcaaggcttaagaatctgcatcatccatctaccccctagactcatatcatccttctcagttaccatcttttggtggttaaatgacaaatttaccattaactcaaaaaacattaaaaaattatgatgggctcaagagctaagtagaactaaccctaataatgcaagtccagctgaacggcagacttgctgtaagcagcactccacattggccactgtgctgtcctaactaccatgacttgttcagaactggaaacattactaaagagttttaaaaactttaaagtgttgctgtggaaggttcaaagagaaagtatacttttattctcgaaaaataccaaatgcttcttcagtgtgtttagttattttaatgtgtgggttgaggttccatcatcatctgcaaaatatagtgtatagtcttgacggaatgratcaaaagagactgcatgtgaaaatgaatcagagggcacttcagcctgaatgttcccaagtggggcaggggtgtattcagagaggggagtgaatgaggcattcatcagcacactgggctgacctagggggtagattctagaagagggatcatagttccacagtgacagatctccagcctgaattagacgagcgcagttttctggctagaagaaatagaataagttagacttgtgtaaccagtggtttggttctccatcaacatttgcattgctgaacagtatttctgcctttgtggctgcaggttttattgttgtggtgagggtagctggatttcctgttgttcctattgtccatcttctttaacctctactcaactasttacttcccaactcagccttgcaccaggcacaaagaatagtcctttaccttgcaaaaatgtaaggaatgctatcaaaggagctcaggtgcggctggtgagtgatgggacaggaattggtttgcctagagattgacgtgactgggagtcaatggtcattggaatccaggtgttcccttttgaggctactaagctgtagtaaagacaagatcaagagagggatgctattgagagactgagggaaagaaaacggcagacagatcagagcgacagtattctgtcaggatagtggggaaaattattagtgttgtgttaggccatatactaacattcagacaggtaaggctgctagtcagtagcaggaaggttaggtaccaagagacaggcctcagtcgtgaataaggcatcaggctaggccccaggtctagagaacagaaaagccgtccaagtcctggaattggtacaaggtggaaatttggttagagtggagtctgagccacctgggctcctttgatagcgttccttacatttttgcaaggtaaagataggactattctttgtgcctggtgcaaggctgagttgggaagtaagtagtgagcagaggttaaagaagatggacaatgggaacaataggaattacagaatctttctgtttattatggtaatttctctggcatgagcatattttcagttaaaaaaagtgttattgttttgaaggaatatatttatgcaaactgtgttcaggttaaataacagttccctgcctcacctgtccttatcttgaatctcactccctatcatttcaactctttagctttttttttttttttgctgcttacctttatgtctctaaataacatgcttataatattatttcttgatttttttcaatattggacataatctggaaacttcacactggcaaagattagagttctgttatattctctacctaccctctcctcttcctcaccaccagacactcatccttccccaaagagttaatcttttaaataaaatttgacaattattaactatggaaagtatttttgtttggttattatgattgcatgtaccatgattgcttttctttctcataaatcatttagtttttcctgaagttactgactttaatttttttttccacagtaacctctgtatctctggtagaattataaaactcataatgctctaaaactctttaagtagtgttttctttttcaccttggagacatccctccacctttgctttgtaggcatgctacatagctgtctggaaaggttcttcacctccttcctgtctgtgtaagattcctggttcctaaatcctgagttctttgttttggaggcatatcttccagtagctttctgagaaaagcagtatgggaggtaaaatattttgagagctttacatgctccagaactgcccttttgctccccttgcctcacatttcattcacagctggtgtatggaattcttgattggatgttactttccttcagaattgtgagggcatccctccattgtcttacagttttcggtgttgcttctgagaagtatgatgccattctgatccctgttctattgtatataaacatgttcttttctagaaacttttagactctttcttgttattctgaaatttcaagatgaagggttctacagtaggtattttgttggtcattattctgggcacttaatagatcctttcagtgtgaaattttcttgtgatttttttttgaaatatttatatcttgtgtcttctccattctctttctggatgttggacctcttggaacaatcctataatttcttatcttttttccccttctgattttctctttgcttttttcttctatttcctagaaaatctcttcatttctaactttcaatcctgcttttgaaggttttttttttttaaatttatgctaccacatttttggtttccaagatatttctgttggtttgttttttgaataatactttcctatagcactctctttctagttcatgagtggaaatatcttctttgatttctcaaaagacttttaagaaactttgctccctgcaygatctgttttttcagagttcatttccttctgtttatgttgctctttgcctttcatgtttaagttttcctcacacatagggtgatccttgtctggccttttacattgaagggtgaggtgctaacgtgagtggagctgtgtgtgtccgctcacatggcgtgtgtgattcttgttgactgatgggaagctagacatttcattgagggatgcacaaatgtcactatctgtgggtcttgtcttttgggccagttttcccagagagagatccttctgtttcctggctggatacagacaagactgtgatccagaactgaggggagaaagttgtttagcattctgggtgtgtttgtatgtggggggagagggtctcattgttccaggcagagtttcactcactcccgctacttttagaaatatgtttcatttccactcaacatttaggcctcttggatggaacatctccaaatagtacaggcttctccctggagagagaagcaccaggcacatggctgtataggttcagggaacatctgggatgtgtgtgctactatagttatagtatatactatagtatatctgggatgtgtgttaccccgggtctccgaatgtaaattgatagagtttagaaatatgtgaaatttayaatctctataaatattcagattaagtggttcttgttaaaaartaaaactgcccaggaagataatcctgtgtaatggtagcagtattcctgtttctgggttgtacattttcctcctccaatttgtctctttcagaacaaattggagctctggcagatcagcatatcattcatgtggcatgtggcgagtcccacagtctggccctcagtgaccgaggccagctgttttcttggggtgcagggagtgatggtcagctaggactcatgactactgaggattctgtggcagtgcccaggtaagaaggttttcaaatgtcagtcgttttaaatgctatttcctgctgttgatttgttagactccttgtttttcttctgttttcttcatttaattgctatttcctttgcrccactcctgtgccttatactattaaaacacttgtcacaaaagttgcaattatttatagaagtgtctgtctctgtttcaaaaatgtgagtcggttgggaactgtactttatttattctagtagcctgtttgcttgctgagtgcctggcagtcgataaatgtttgaataaaaaagacatctttcacatcgtaggcttattaaccttcaactgaaaattgcaagtctgaattactcaattaagtactttaaaatagaatcacaaagctgacctgttactctgataggccaaatcactttaagcattacaaacagctaaaataccagatatacatagattctttaatgcaaaaatgttaatacagtaggttttgagtctcttaaagattcacttaaatctaaaccttagatgatttagctaagtatctaatagttgccactaagagaacatcccaaatattgaagttactttcaaatggactttttagtggtggtgtctcagtttgttgaaggttcttaatgatcaaagagctgccattttatttcctttattcaattcttactcctttgtgctacaggtgttccacataccactactatagtacacattctttgtaattgtttatttaatatctgtttttactacaaagatgtgagctattaatggcaggataattggatgatttattttagcatcaccattgctaggagtgcctatcacatacattgctgagtacaaatttaataaatggcctctcctcctctgcctaattatcgtcccctttaaagaacagcatattcttcttcctcttcttttttgcccttgttagatttttgtctctttaatcaaaagttgtgttaaataagaggaccatggaggtaagagtgatttgattcagttcttgatttaggacaggtaatgtcttagattcatttcttccaaaaattaatttaattttgtggggagaggaagagtggcagtaagaaaaaagaagtgctagatgttatgttgtgtgtaatactagggaaaatgtttataacattaatggcaaaaatatttcatttgttgatgaccraaacacaattaaggtttttaacggcatttcatttttaaaaatgaagtaatctgttctacagtaatagcttaatattcattattcatgttcaaattatggatgacttccaagactttgatttgtatatagttttctattataagttaattgaaataaattcactaatttatacctttgtattgtggaaagtaacatagctttgatgtcaaacaagccttggattccaatactggctcttttacttgtaaggtgaatgaccttgggcaggttaacttttctaagcctcagtttcctaacttaaaaattacttactatgtaccttacagggttatggggaggatagaaggagacaagtaggtaaaatacagtatgtgcttgcactgtatggactccctcttccccacctcaagggtacaatttctctattatctgtctttgttcttctgacctgcttcttttctacaactgattgtgacaagagtaatggtgatggggaattgttgaagcaattctctgcctcagcctcccgagtagctgggattacaggcatgtgccacaacgcccggctgattttttttgtatttttagtagagatggggtttcatcatattggccaggctggtctcgaactcctgacctcaggtgataagcccaccttggcctcccaaagtgctgagattacaggcgtgawccactgtgcctggccttaaaaagacttttaggcaagatggtgttatttattactgacattttatttaattgggaatatttctgataattgtgtttgtgtgtgaatatctatctgaaaaagaaagccttttctgttttaggttaatacaaaagctgaaccagcaaacaatattacaagtttcctgtggcaactggcattgcttggctcttgcggctggtaaagtaacattaaacatatgctaatgctatgttaattttgaaaacatttctctttgtctttttgtgtgatattatctaactgaaaactttgaattaactggttagggtctatgcattgctgttggacagtgacaattctcatatgggctttgcatagctcatccttttctcagggtgtgggtgatgaagtaggtggtcatcattgctgctccaactttcacaggggaagataagcagggggcaggaccatacctaggtgttctgagcatggaggagattgatttttcttagcgacagccaactctcaagctacattccactatcaagctcccaaatgaatgaaaaagaaggagttggagaaacctaaataaatctgcacttctgtgtcctgcttgattatctgcagagcagaccaagtggtcattgctggacctcccgaagtcttgggtctcatagtcttagtgtggtcagaactagtgtgatcttgcttaagcctggtaattggcctgtccgaaattgaatttacttatacatttaatattttctgtgtataaattttaatagcctttgaagggcagtaagactcagcttacctctctgttatatcacttgggagttttggttttggcagtctgatagcatgaagtatctctgttcctttgctcttgggtgggtttggtgttggggggcaactggcaaatgaccctaataactagattatttttgtgtgtggagcttgtatcattttatggtaataccagttatcctgttatttcagatggccagttcttcacctggggaaagaacagccatgggcagcttggcttagggaaggagttcccctcccaagccagcccacagagggtgaggtccctggaggggatcccactggctcaggtggctgccggaggggctcacagctttgccctgtctctctcaggagctgtttttggctgggggatgaataatgccgggcagctagggctcagtgatgaaaaaggtaggtaaacccttcatatgtatgtatttagtttaaaagcacattcatttaacacatgcttcttgaggatctactatgtgctagccccatgtgagatactaagggagaagcagtgaacacaatagagaacatcctcgtcttagtggagactgtattctagtgagtagaggtgcaacaaaaccagtaaatacacaggatttgagagtgcagcttcctgctttacataaggtggtggggaagggcccctctgataagaaaatgtttgagcagaacctgtaggaaatcaggtgggagatgggacatgtaaatgtctgggtgaaaaatgttcctgtcagagagaactgggtgtgcaaaggtgctcatgtgggaagagatgtagttggagaraaggggaagagtagcacagctgcaggtcagagargtcgtgtagacccagttatgcagggccctgaggggcagggtgaggatataactggttttctcagtgagaggggaagaccctgagggtttggaggagaagcgtgatccactttggctttggctgtagtgggtcaagggggaagctggaagaccagcttggaggttgtgggagtaaagtcagattttaaacatattttgaagatgaggccagttggttttgttcactgttggatgtgtggtttgaaataaaggaacagctggaagggcaaaatgactgtttctgaaatggggaaaaccgtgtgtagtaaagtgagctggagagtgggcagggttggagagtgtagggaaaccatgaggtaggttttaggtaaattaaaactgagaagtctgttggatatccaagtacagatgcaggcaggaaactgaacatgcgtcaggaatccaggnatccaaaattcatgccaagatagttgtgwatatttcatctcaaaggcaaatggtagtgatattctgatatttaatttattctagatcgagaatctccatgccatgtaaaactcttacgcacgcaaaaagttgtctatattagttgtggagaagaacacacagcagttctcacaaaggtaaggagctcagagtattttactttggtgctggggatawgatgkgtgattagaaktgcttgattatgttagtgtagtgatggtgtgtgattacagtattgtggcttgaacttgaatgctctcttttatgtgggtttgttgttttccaaaggaatagaaaaagactacttttttgtatgtctctgttatcctctttggtaatcttgtagatttttywtatatatatatatatatatatatatatatatatatatacacacacacacatartgtagattatatatatatacacacatataatgtagattatataaaaatgtagattatatatataaatataatgtatatatttatatatatataaattccttggttctttatggaacaaagacagcactttgttatttttatttgttattttatgtatatataatatatataaaatgatgtcctatgttcctttaaaacaagtcatttaaatatgtaaaaaagaaacagcaatttaattaatgttttaaaataatcatgtttcttttgcttctaaatacattctakagagaatgaaaatgtatttttatattgaacaaatattattctacgttcactttgataaaatgccttaacatttatttaaatacagctgttaaaaaaacagcttacttaccaaggaatttgtagagcacctaatttcttacatgtgaatgatcatgtaaaatcatctcatttagcctagctcctagtttctccttttttaaaattttgcttcctaacacatcattgtactttcaaacgattttaaaaatttacagaaggcacacattcctttgagcattgctatctttgttccataaagatgcagtctgaaattccctttttattatttttctatttaatgaacatccttacaaagtgattttggccaagtgtcaagtgaatgtagtgctcttgtgcacattgttgtgataggcattttgtatacagggtttagaggtatacccttaaagatacartgaagtcctatggtgtttgttccttgttagagtggaggtgtgtttacctttggcgctggttcctgtgggcaacttggacacgactccatgaatgatgaggttaaccctagaagagttctagagctgatgggtagtgaagtaactcaaattgcttgtggcaggtgagtgttcctcaaagcttgcttgtattcactaggacccagaaattggtcttatctttgtagtgatgaagaatgtgattatacctagtcaccgtcattttaagagatcttaactgcatgcacgcytakggtgaaatgtggagaaagaccttgatagagtgtggcaaggaagggttttagataagcagagcaacacggagacattaggcttcttttgggataaagagtagcaggatgtggggaagggataaagaaaggaaaagtgagagagtcccaaagaacttcttggaaayttttgcctgagtctaccctgcttctctctgttcatcttagaggccacatgcagyagatcwttcagctctttcctgacttgccaccctcctcatgatctagagtgttagaggatagtattatggagagcagccgctgcaagaagagtcacgtgttaacatgggaaaggctctataggagcaccctgtgctgtgcacatgtggaagttaaaagtcagagtcagagtgtacatccacattagtagaaactatgctgatgagttaaattattttttcacagacaacataccctagccttcgtgccttcttctggactcatctatgcatttggttgtggagcaagaggtcaattaggaactgggcacacttgtaatgttaagtgcccatctcctgtcaagggttactgggctgcccacagtggccagctttcagcccgagctggtaagaatgattgtctctggaatttaawggtattttaagtgatgaaaacagttgtttacagaatatgtatctattacttactttgaggtcttttggagggaatgaagataaggtattttttaacatcaattaataatttctgtacttactatgcatgaagctgtagagttgagatcctagagaataaataaagcaggaaatactgttgtgttaggccgttcttgcattgctgtaaagagcacctgaaacagggtgatttatgaagaaaagagttttaattggctcacagttctgcaggctctacagggagcatgatgcagccatctgcttggcttctggggaggcctcaggaatcttacagtcatggcagaaggcaaagaaggagcagacacttcacatggcagaagcaggagcaagaggaagagtggagaggaggtgccatactttttacaccaccagatctcatgtgaactcagagcaagagctcacttatcaccaaggggatggcccaagccattcatgagggatccgccctcatgatctaaacacataccaccatgcctcacctccaacattgggattactgcaattcaacatgagttttgaccagaacatacattcaaactataccagttattttgtttccacagaccttggtggtggtgtatacattttattgttgttgctaataatgacagttcgcatgtattgaatgcttaatgacgtttcattactatgcaaagcactcaaaataatctaagaactagttagtggttattatccccatgttagagataagggaacaaagtcttaaggaggtcaagtaatttgcccaagatcacatagattctggaggcaggatttaaacccaggtcattctaaatcatgtgtactatgttacctctactttgctgttggcattttggtatataacatgatgtgatttctttttawgccattttttttcttcccttaaaaaatagttaaatagcagtcttggtttcattggaaatcaaagtcaggcagtcattaatattgaatgactgcttcaccttgaaataataaatctgaggctgaaatggagctagagaatcattaaaaggaagtgtaacttattaattttgattttgaagtcgataaagtgacacacttatggcttgatcaggaatttgtttgaaacagtaaccatcataagttttagtactggattataagaaactcaaggacacagacaaactcttttcctttttgtaaacctagcatatagcacaggacctggcatgaacttgtcactcagtagacatttttggaatggatatatgagcatctgaaatgtagtgcaacttaaaatataaataaacaagattttgtctgggtgatgttcccagaagcaaaagaatggctttgtgtcctcttctctgtaatttgtaaattcttttctccaagacattgtactcatacgtggaatacatttatttagaaagtttaccaactcaggtgttttttggttatttcaaaaccacaaatttttgaagttgaattataacctgacttccatggtcctaaatttgtgcttggatgtttgccaaaatgattttataacataagcaggtaaatgtcagttatgtaaatgacatggttttaggaaccctcttggtaatgtgggagcacagaggaaggcatggaggagtattgtggttagaggaagtttgagctgtgcctcgaaggatgatttggagttagccaggtgtagaggactgtgagggagttggtgtgagcaccaccaaggtgcagttccagaagcacattcaggttgtgctctcggtgggcacattcatggagaatcccatgtgccaggggcagcagaggggggaggcaccgagatgtgaaatagtgtggtgtattagaaataaaggcaacgtggtagtaggagaatgtcaccgtggacacagtgtgatgggaggtaaagcagggagcaggaaacggaggtccttccrtggcaagattcgtcctgacggggcctgggcccaccacactcacatgctgaattgttaccataaagaatagtgcccatttcagatttcaggtcagtggcatgacagagttagaatgaaaaagagaaactaggtcaggattcactggcagttggggaggggcagaagaagagttagagtggaggataccattttatatatttatttttaattgaagtagaaacagtcctaggcagtgagccaggggagaagatttcttacttctgtgacacaattaaaatggataggtacccactctgaagtgtattctgcgacagtagaaaaggggatcaaggagaaacttcaattaatgaaaaatatgctttcggaattttttttttgacagatcgctttaaatatcatatcgttaagcagatcttctctggaggagaccagacttttgtactttgctccaaatacgaggtaaaatttttcttgtgactcttatttccaggaaggaataatagtgaaccaacatttcttttaacaagtaattacaacataaagagcaatgttactctttgtttctaccaatcctatgttatttttaaaataagcaaactaaatctggaagaagttgtctccatttggctcccttgaagtgccaacaattctcctggaattatggagttctaatttataatttgaaattatttatttatatttgtacttgttccagaaactctgtaaaggatgcctagggagttggtgcttactttggcattatttgattttccatttcttttcttccctgttaagtggcaacaaatgctaggtgtttgagaacttggtgggtttctttgtttgatgtgattgagtatatatatgtatgtaagaggtaccacaattttcagatgtattttattatttgtaatctgcttatgacatgacaccaaaatttcccttccattgtctcctgcatcactatagtggataaagacactgtgacattgtctttctgcctgaaggtagagtgtggatccaggtttctgtgacagggctcgaattccttccactcttccttgctgggggaattcagtctggaaaaactccacagatttgttgtcagtgctggactccttcccctgtgctttctctcctctcttctcttcttccccacccttcctgcttttattcagcaaacatttcaacaggaccagctccgagtggtgcatggatccttatactctcttggaggagcaagggaatgggctgttagtgaagaaaaaggagtcagaattgactgggaagataatgagcaactgtggaaaccaggggctctttctgtcttggaaactttctctattagtttgatacttagctatctttaagtacacaaagtatttgccttctagtcattctgattctgtgattaggttggaaaatcctggtggagcccgaggctgtaggctggacagctaaagctgatgattagctattttccaggtcaggtgcctgaagaaggtggcttagtgctaccatctggcgtgatttggaactgctgccctagacttattttagacccagcctcagagtgtgtattacagagaaatcctgaggaagctgaggtttttctttgtttcttcaagatgtcaataaaacraaatacaaaaggcactgactctgtggaggataatcagtttttgtccataagtaatagagttttaagtatttatttcccctagaaactagtattgaatagtgttattcaatagtatccaactttaattttcctgtgaaatttaacatgaaatttagttttctcttgtaaatatagtatctgatatatgtaactgatttttattattgtaatcaacaccttgggcctggaaaacaacacactgatgagaaggaagtgaagtagcatactattagagaggcagggcaggttmaagtttaaacaactggaaagagggataggtatgcatgaaaagtgtaagatcacaaagaaaaaggaaagtaaacattacttaagaagatgttgctctttcttttgaaactgaaacctatgcacatttacttaaactattaaccagagatgattatttagatacagaggctgatcaaatcatatgcttaccctgttaccatatcacttaaagamccaagaaaaagcacctgtatagttacagcctctatttttttttttttgagatggagtcttgctttgtcgcccaggctggggtacaatggcgtgatcccggctcactgcaacctccacctcctggtttcaagcgattctcctgcctcagccttctgagtagctgggattacaggcgtccgctaccatgcctgggtaattttttttgtatttttagtagagaccagtttcaccatgttggccaggctggttttgaactcctgacctcaagtgatctaccctcctcggcctcccaaagtgctaggattacaggcgtgatccaccacgcccggccatagcctctatttttataaaaggctgactcattcattactgccaggccttaggtgaaagaagggagggaaggagttatattcagatacccctttgctacactgattctaggtcttgggaatttagtgaatgtaaaccatagcatctccttttcctgtcgttttgttccctggatagaattgaagagggaatgtggttgggattgttagaattgtgtgtgcatgtgtgtgtgtttgtgtgtgtgtctatctcataatcttctttttcctggaacagtgattcttaaccttggctgcctactggaatcacctgggagctctacaaaatactgatgactctagagattctgatttaattggtctggagtatgacttggtcatcaggattattgaacgctcccatggtgattcaaagtccagccaaagttgagaaacactgacctaagagcaatttttccttttttgcctgtatgtattaaagacaggaagaatgatgttttttcttggttctttaagtgattctgaacttgtacttcacccaaggcatctctggtttattggacatatgatgaggaatgataaaatagttccaagtctttattttattgtaggtttgtgttagagttgatgttcagctgcccctttgaatgggggaaataaataaaatttacgtaacaacagtggttttacaaggaggtggaaagacaatctctgtgtgtactccagcatctgctttggattatgagtttcctgtatgttgtacttcaagatgatttttgttctctcaatagatatctgtggccattttagtagaatagttatcaataaccagatgatcacaaactttgtcaggcatctctgttttattacatgctctactccttcctaccataatgatacgttaacttgaagctatgggaaagtaaccaagaaaatttactttgaaagttatgtttttatgtgtaggtacaaaggagaaaaaaaatctcatgagctgatgaatgagtgctttaatattacctttttcctcttcactggagacgagaataggagtataaagcaccatcaacctttccttagttctcgatcaagaacaaggcttggggaaaataagttgaaaacaagcaattttagaaaaggaaagtgcttattatgttttttttctttaatctcactgaataaaagatgtacagtgttgggcaacatttggaattttcaaggacatacattattaacatctttttctgccatttttcttataatagctatatacttgaagcaagaaattaagagtcattgtttttataggttatttgtcatatagattataactgaactctggctcttttgtaatacattttgttgaagtttggtggacatttatggcagatgactaataccttaaaaacctgctgttacagtgattcaaagcaaaggggaaagaagtctgggaaagttgtactgagttggtttctctgggaaacagacccgagactcaaaggtttttgggagagtgctttctagaagaacatctactgagggatgaaggaggcaggattgcgcagagggaggggttgaaatgcaattcagttataacagaggcctcagccagtcccatgaggagcactgaagttgtgatggtccttcagccagtcctgagttgaggcaagcgggctggacctttacaccatgcctctacctgccattggatgtgatagtgaagcaacagtcaatgccaagtcctggacagcaacccagctgggatctgtcaggagcctccattctgaagggtggaggggatctgggcggcacactgcagcatttagatcataagtgaaacgtaaaatggagaatatgtgggagaaaggagaggagacaagatccatgctacataatttcttctttttactgttacatttaattctccagaattattctcctgctgttgacttcaggactatgaaccaagcacattataccagtttaataaatgatgaaaccatagcagtttggagacaaaaactctcagaacacaacaatgcaaatacaatcaagtatgtgrctgcttgtcttcatttttttttccacaaagtatgttacaactttttagcttagtgtgattttccgtacttgcatattgatactgtgaatgtaaatggggttttacattatagggaatcgtgggttatttttggttactatttcagggttgatctccttagccccaaatagcataatggatggatccccaattctcacacacagtatatgcctcaacctgccttgtttattgtatgatcttaaaaatcctgactgatgaaggcctgagttggtgattctgctaagagagcttagcgttatggttaactcccatgggttttagtgtatgcatgttccaaaacatcccaaatctgagacagctgttatcttacctaatcttaataatttctagcattttcctattcataatgattgagatggtaattcagagtcatgtagaaaaaaaaaaaaacaacagtaagtaggattgagagcttttatcaaatttaaaggacaattttcctttgcacatttttacacattttcattggctttcctcagcctctccacttttttctgcaaagtctgattcttgggaagaataaatcaagctctgtgcactaagttgtggttattcccagaaacgtacataatggttcctgcattatgacatagattgtagtgggccaaatgaccaggacgctacactttgaggcacttgagctagtaackttgtgagtgagagagcattagaaacgccctagagcagctctgtggcagtcttcagaatccctctaaccttaggatggctctgccaaggagctcaggctgaagggtcgcaggggagaggagatgagggcttgctggggtccagcaagggaaatggtgacactttaccattagttctctgttttcttatttataaaatgaatggatggaagacatgatctttaaagatctttcctgatctaaattctgtgattaacagaaactactgtaatcccctccccagctgtatatttgtgttattctttcccttttccttacactgaatggaaaggcccagggttcctgatgtccagtttcattttgggccctcagaattagctgtttcctcagagcctgtrtaatagaaggtaatgggaataagcactygtttcactattttttaatttatgtctcagatatgcrgcaaaatagaagtaatttttcagttattaatttgccaagataatttctgtgttcgggaagtaacagcttggcttctcttttttggttttattctgtgtttctcttwggagtttagatagggmacttcttagatggttggtggtagaaaaatattcaagaacattattgggacaagaggttttctttcaggagctttgatattcttttttttcccctaacatgggaaacttaagttcttcttcattttgagatgtgacatcctgtttttctaaagcaaatgtacattttccaaagcttcagctgacaaagagctgctattaatgaaatccttgagtagatggttactttattrttgatgcttaaataaccatttatttgtaattattaaaggcttccccctcccttcttttctttgagcagtggtgttgttcagatattatcttctgcagcctgttggaatggaagttttcttgaaaaaaagtaagtgacttagagccttaaaaaaccctcacgtgtacctgtagtctcaagctatttggaaggctgacacaggaggattgcttgagtttaggagtttggggctttaggatgctgtgatcatgcctgtgaatagccactgaattccagcctggacaacatagtgaggccccatctttttaaaaaaagtttcttaaaaccccacatgtgatgcaaatacttactcagcaaaggctgtgaaagacttttcttctctttgatggtggttggccttaatttaatgagtaagctgatgctttgcgcaaaaattggaaagcctaataatgrtaatgagaggatttcaggaagagcaatgctgattcatacctggatggcagaaaagcagattaccgagagagactgtatctcagaaataattggtagaatcatcagtaagattttcagagtattctaagatgtgtcataattctaaattcttaattcctcagataattttcttgatttctttggtttgctttcccacagttttaaaatttttattattttttatttttttctctcaaaaggagtgaatttcagggagtaattctaaggaggcttcaggggctccttggatttaggtccagcccagctcaccagagaattatatttgaggttgaactccccagtagtaaatagaatgtttatttgcttagccttatcccttctgcaaatatctccctcaggaacctgatgcagcaaaagagtcttgtcatgggtttggatctttggtaatcccaagtcctaattatttctcagtcctttctgccagtgaccaggctatatgagatctcaagatgaattagacttcatttctgtgtgtgaatcccacccctacccctcragccctgtgttactcaaggttcttcagagaaatggaacaaataggagagagataaatagatagatggatgtatctagagagagggagaggaagagaggggatttactacgggaattggttcacctgattatggaggttgagagatcctgccataggcatctgtaatctggagaaccaggcgagccagcatcatagcttagtataagtccaaaggcctgagaaccagggaagctgatggtgtaactctcagtctgaggctgaaggcctgagaaatgggtgggggctgctggtgtaagtattggagtgcaaagaccacagaacctggagttctgatgtacaagggcaggagaagaaggatgtcctagttccagaagagagaaataatttgtctttgctctgcctttttgttctgggctttcagctgactgggcggtgcctacccacactgaatgaggatggattttctttacttagtcactaattcaaatgccaatctcttacagaaaactgacccagacatacccagaaataatactttaccagctatctgggtattccttaatctagtcatgttgactcctaaattcaaccatcaccaccccctccccacaaatgagtccctaactgggttgcaggaggtcacttcagaaactctctttggttacatttagagattataaagtcatttacttttataattaaggcagctgggatgagctcacacaattcatttcatatttagtaattagttttttcctctagggaaagatattctggattatgctgatgttggccttccagaacaggggttctcaaccagggtgattttgctccccaaaggacatttggcaatttctggtaacatttttggttggtacaatggggagggacttgctattggcatccagtgggtagaacccagcgatgctgctaaacatccttcattcccacctgcccagcaaagaatcctctggtcccaaaagtcaatagtaccaaggttgagaaaccccgttctagatggatagctttcatgacatttgggaagggctcttggccagacttgttaggttgttcatccttagtatcacagatttcgtatagagttgtggggaaagccttttattttttttcaaactgacatctgtgtatttcagaaagtctactcctgtagcgtacataggatgcatctcaggaaaccaatcaaaatgaagaccagatttacaaagcaataaatacgtatagataaaacattttgtttttgttttctcaacagcatagcaaaaagcatatggaaaattacatatgggaaaccagaattcatttctatattttgggcagatttattttaaaaacaataacaacaacaacgaaagacccaaaaaacaaagtacaagcaatttatcttcatttgagcatagggttccgatacatataattatgatttttaaaaaatgttagaaactcttatgttttcaaaaattataacattgctgtcagagtgtattaaaatcatctgaatgtgtccattactcaaaaacagaagcctgctttgcaaatagatagctcttttgtaaattaacaaatgtggtaygttcaagagcaggatatatgagatattctctaagtctcaaaaatgctaagattttatttaaggttaaaaaaatgatttagttgctagaaagttaaaaatagtggcaatgaaattagtccttgggtgaatgtaattgtatcctttgtgttaacgatgagagacattmactttgcatttactatagatcatttttattttaaatactttggtaagaaaggctttcaacaaggaagttctactgtcatttgttgatgagtggaccagtttgcacaggggacgttatttgtaccaagccacagcatctacatctagttcaatgagccacaaaaacagaaaaaaaccaaaaaacacaagatgaaatcagggaaataattatttgtttataaacttcaagatagccttaacttgatatgacagtccttgtactttgacttgaaggaaaacagatttaaaaatttgaaaattcttgtaaaaggaattccagtgtggtttattctttgtgaaagaataatattctgtattttgggtttattattttgagatttatgcaaagtgtagtatttttgtggatcttatctgcyagatcaaatttaaatctgattactaagaacacagtattttacttgtttataattcctatcagagtgtttgctttttcttttattatatacctttttgattttgtttgtttagaattgatgaacattttaaaacgagtcccaaaatccctgggattgacctgaactcaactagggtgttatttgagaagttaatgaactctcagcactccatgattctagaacaggtatgtttctatatttgtaaagtgcattcttaaaaatgcatttttgtatngatgaattcaacttcaagagaaaaagagtaagatgaaaaagtgaaagtctccaaatcttaattttgtaaagtatttactctgggaattagacctaccttttgctttcttttggcttaaacctttccaaggcaatgcccctctagaatatacagtttgcactggcagggatctttggcttttcttttcatggatgtgtactgagggcctagaccagtgtcaggctcatagtaggttctcagtgcatagtgaatgaatgagagttgagagtctatcaaatagcttatgaacttagagaaagttaactagatctcaagtatgtttgaatttctcattactcttttccctcatacagattttgaacagttttgaaagttgtctgattccccagttgtcaagctcaccaccagatgttgaagccatgagaatctatttaatactacctgagtttcccctrctccaggattccaagtattatataacattgactattcccttggctatggccattcttcggctggatacaaaccccagcaaagtactaggtgaatttgctaacctcgatatcagtggttttatggtcatttgttttgttggtgtgactcctggctctcagtggattgagatccaagaatctatttgttgccatttaatatccttaacacttaaaacctttttttctttgctgttaatttttagctaaccctattttcaagttgaaaataaaaccattatttagattatttgaaatgactcatgccagaataatcttgattttatagtattcacaaacctaatttatttaacttgaaactatttttttctaccacatttgctcagtacctcagtattactgtacgttggtctttctcctatgtctaatttagggggtgggagtgaagtgaacagtttcggtgatacagaggtctccaaaacaggagaggaagaaaatgacctagtgtggacttaccaaatgtttgttttgtttttcttttttaggaccgttgagtccacactgatttttgcaggctccggacactttgctgagataaaaaccttccattcctcagtgatttggagagtgtctttcatgggagtagcacctgaaatgtttttattactcaagtgcaggaagtctatcacctggctttttacttttttcccccctggtaaattttgttaggtgtcattgcagctcagtaacttctgtgttccagatggactgggatgttacttgagtgtggtctcgccgtgaataaagagattgtgttcctgaaggtggaatactggcttttctatattgcctccacctttgtagaagagataaaaacagaaataataatgaaagcactagtaaatgttagtacttaattttttttaagatcaaaagccttttgggggcacattttctcaggtgttctagttgatgtgaaacagagaggtggcaatatcagaagaaatcttacctgactttcaagttttagagttttttcatttttatttttccaggctggaaaatacaaagagaacataattgttcaattttacactttatttttaacttctaattattgatatttaaaagaataccccaaagtagagagtatgctacaggtagtcaccacacaaattcagcagttgtcagtattttgcccattttatttcatctgtccctcgccctcaccacctttttattttttgttggagtattttaaaggaaatctcagacatactatttcattctttaagtatttcagtatggctgagtttatttccaaygaagtataagccagtggtatatcttcttgtctggttatgagaaagcattttttggtgagaagtaaaaatcgtagtttttcaactaatgatacctcttaaagggaagggaatggttgccatattggtgctgcttctagggtatgtggtgcgtcatcctttgcatttctgcttcaggatttagtgatggctgaaagcgctaggacataagaatgctttttggattaatacattgggcatcactcctgcccaaaatatgtgtatcttgtccacatgtagtctggaattggacttttaagttaaccttcagattgagtctttgcaaaaaatcagaccaggctttacaaaaaaagctccagggattcttktacagctgttgttctccccaaaaaggttttaatggattctttttaaagtcagttttgggaaaatgtattttagactaatgtttatcttctagacaaagcaatttttaactggcaggcagaagacataaatacttgcccaagattacatgttgaaatatgtcttttctttctttctaaagataactggtggtctcaggtatgcccgaaatatttcatgaagctggtaaacctctataaaggtgcagtcctttatctactgaggggaagaaagacattcttaattcccgtactgtttaacaattatatcacagcagctctcaaactcttggagaagttatataaggtgagcataggaggtgctagtggggagggggtgattagatggtagggtaaaatgtcctagtgagatgttctctgggaagccatgtttcagttgtctgtattttgttcttcattaggtaaatcttaaagtgaagcatgtggaatatgatacattttacattcctgagatttccaatctcgtggacattcaggaagactacctcatgtggttcttgcatcaagcagggatggtaagaattcataaagcatattttaaagctttagtctttttataagaaaagcacatgtgagctgtataatatgtctttgactttgatgtcagtgtgtcacctattcttcatccagctggccttttgcattctagaaacttggaagtgctttaagtaatcatcaatgttataaggagtcataaatgagtagtcacccagaatgttacacattttatcagttgccccctttaaaaaaatcagagtatctaaagtagtcaaatccacagaaacagaaagtacagtggtgattgctaggggctggaggcaggggaaaatggagagttgctatttaatgagtatagcttcagttttgcaagataagaaagtttggagatccaattgtacaccagtgtgactatacttaacactgctgaaagtgtacacttaaaaatgcttaagatggtacatgttatgttaggtttttttttaaaccataattaaaaaaacaagacacatacaaatatgaatttttagctttcctcaaaacttggaagatctggcaacacgacctgtcttcccatatgacaccaagtggctggagttcaagagtgactctttagatgaggcttatgtatatgccacaattcccactgcagcgtaatttatccctgacattgaggaagggtcatttgctaattatcatcttctgacagcctactccagtcatcatatgtcagctacctggaccccgtaggccccttctgattgagaattatgtgtgtgaaagtgtcacacatccctgaccaagtgctgtctcaccgtattttagatatgccattcaggggcctgtggattcctgcctaccacctctggcgtggcaggaactgctccttttgatagcacaccagcttgggatatatgcaaggctctttaggatctcccatctgtggagtatgtgcaaatttgagttaggtcagaaaacagaatgataatttggttattgtattttgtgaagccatgtgcagcagatttgaggtgagtccttgccagtgtagcaggttcatcaccagtattagggcaatatttttcctgtggggtttttggaagtcagcagttgtctccaaaagcaagacatttaaataggctgatctaactgaacaagaaggattgttttctttgtcaaataatagatgatgaatgctagacacaatgttgtatttttttctctagagacttaaaaaatgcatacaatgttttatttttaaataagattttatgattaccctgagaaaacaaaatactttttttttgagacaaggtctggctctatcacccaggctggagtgcagtggcaccatcttggctcactgcaacctctgcttcccaggctcaagccattctcccacctcagcctcccgagtagctgggactacaggtgcgtgccatcatgcctggctaatttttgtattttttgtagagatggggttttgtgatgtttcccaagctggccttgaactcatgagctcaagtgattcaccagcctcggcctcccaaagtgctgggattacaggggtaagccactgtgcctggccaggaaaatactttttaatataaatgagttagagtgttctaaatgggctgacttgggaaatttaacatggaggctagtaatgaactctgttttcactttcaaatttaggaattattaaaaaataagcccttctgttttatcaatttatgaataattattcactgaataataacattatgagcrgaaaaataagcctgatgaattatttagtccaactgctttgtttctagatgaggaaatggaagttaaacaatttttccactaatttcattagtagcagtaaaagtcaattcttctgatttctaatctaccctttctgtgacttgatgctgaataaaataagtctaacaaattgtaattcttttttactctgaaaaagaagttgctcatgttaaaatctagattattatgacagtagtctctgagtagagatatttaagtaacttttacaatattttaaacttcctttcttttaacatttgataaatatcttatcagatcttgaataacagatgctcatctcttcaataactataatagttattaaagaaatatggaaaattacatgaaattagtatatggccttttgtgatttttgtggaattttttttattgtatgaggtacaatgctattagaaattgaattttaaatgtcttgatattttgaagtttaatttaaaatactaaagctatttcatatgttatttttgtttaactacttttaaataatagatggatttttttgatgtgtgttggcatttttagcttgttaatagctgaggctgtgtagtatattatygagcacatgctccagtcaaaaagacctgggttcagttccttactctggtctaatggccatggccttagacaagttacctaatttctataggcccagcatcctcttttgtgagtaagaattataacagattgtggaaattaaatgggagaaagcatggaaagaccttgcttagcagagtacttagcatataataagccctcaataaatatttttcacgaagcagttcttgagtacctaatgtgtgccatctgcctgctagtcacagtggaaacatgtatggatatggtgtctacctttgcagagtgtttagcccagaagcagcagtgaaaaattgcaaagggatctaacacatgtgtgcagaaggaacattctaaagtggctgatttttactccttttaaagaagaggtggtagtggttcctttacttcaatcagtaacttgccattatctgcacttaaaaaccaaatagcacagagtgaatgagtggtgggctcctctagagggcagcacaagtggggaaagtcagtgccacagtgtaaatacttaaaaaataaaagctagataaagctcgacatcttgctgtatgtgttaaaggagacgcagccaggcagtgttttgtccccagttatgagtattgtgcacgtgtgagacaagacaggcactaaggcagaggaggctgtatttcttctccagcactgcaggtgtgcgtgtagtgcctcctgccccacttgcagccacatttaggagatgttgacttcgtatttaaaaaaaaatgatattcccaatttttctgttctatcccatttacttattcattgcttctatttcatatactttaaaaatgagcttaggtcacagtgcagcccygtttcaggcagggagacttgaaatatggtccactagtactttactagttttaagtctgtgatactcatttttgaggaatggatagtccaagacaagtagcctctcaggagataatcatgtatcttatcagttcgtatgcatccttctaggttatgaatagcaatagtggcacaaaatcatgcagatttattttgtataatatggaaataccagtgtgagtacaatttctaaaatattcagtattcacagaataaaaattaatgaaattaaattattatatatcaaatacaaaaacttacagacttacaaaaagtctgtggatgtataagcagacctttgctacagattcgcggcttcttttgactgaatatcgctccatcctttgccttccttagagttggcacttctgttttgtaaggcttccatatcttcctgcctgccttgctggctcacctgagacttctctagaccaccagctctgggcagtgtctctctggctttggctgtggctcctaactgaggcagttttggatttcttcccagccatcccactcaacagagagaatggtgaccctgccctcaatttaactcctccccttctccagtagaaagatcagcccgcttccaaatctgggttccttcacctctggggtgtgggaaggggtcaggtgagggatgcttagagggactacaagctgccgaagctgggtatttaaggggtgcagggaggctcaaggtgggggttacaggaagagggtggggggagagagtcagagaacaggagtgggactggaaagagccaaggaatacagacaaaactgctgattgatgtctgaaataactgcattacaccaactaaaatgtcagtatgtacttaaaaatactaagtaggctcggactctgtaatgccagaactgtttttattatcacttcttccacagtcacttttatatttgaaatatctaaaactttatcttgctttatagaccaacacacattcaagatctttcttttcccttgagaataggcagataatgctttgcataaactaatctcttctgagagacagattaggaaattctgaatattggcaccagttttaagcctactttctttcccaggatgcttatatcttttgtaggtacctagactagaagatgacttagctttgtatagtgctgttttatggtgtggttttgtttttttgtttttagtcatcttgatttctaacttcaaagtaattggatatgtaggcatgagagtgagtaagattggtctgrattatatatgcaggatttcatacctgatctcactggactggaattgtttcttcaattagtgtttctctgtctagagaaatgtgccaagatccctggaggaacctagttataaagggttaacagggtagattttaattaaaattgcttataaatgattttatttaaatatccataaggacaagaggaggcacatgctgcttattcgcatactactgatatagtacaattataaaaccaaaccaaatttataaattaaatacaaacaaaactctaacagcaataaaatgcagattagcctcattgattttatgtgatgatcaaacatgtcttactgaacccaaaccctagttgcattgtggatgtggcctgcctgctgtcaggccctggtgcttgagttccactgcccatctggctgggatgactcgcctctgttttctccttcaactgctgttaaaccatgtttatgcagcaagccaggaccacactggccttttcttaggtgcagatggagcatccacatgccaagactgcttctctcttttctcactacacctggacgattaaataataacatgatgccaatgcagttattcaaacaaatgtaacttaatgtgttttactaattttgtttaggatatcattaagaaataatatagagcactcccagatctctgagaatacacccatggttttctttttgagaattcttgctacagatcaacataacstatattgttgattttttattgtttctattaagttaatattaagttaatgtttgttacgtaacttaacaaaaagtgaacctataacatatctcctagatgtccttcattgtggttgtgggttttttaccattactcccctccaaagtttattcacaggtgcattcacgtattgatggaatgtgttctgtaagccaagtactagtctaagtgctgagtcagtgacagcttactagataaagttctttttagaaagacctgaaattctttccaaatacttggtttctcctaagagtagcagcctgtgtgtakgtgtgtgtgtgtgtaggaagatgcaacatcatttaacaaataaaatctaatttgtattgtccactttacccaacaaaaattaacctgtgaagtcaaggttgtaaagctcctgttttggaattagattgcttataaaagagaattctattaatgctgtgaattgtggagagttagtgacatgccctttaacggtcataagaaaatgttttttaattgcttttgctctttttctcattctgtggccatcaaaacatcttttccctcaaaatttagtcagccattcaaatggtgttagttctatggccagtagtcagattggttctgtgttttgttatttatattttacttttggaggnattaaaattcagggtttacaatttaagtaagagactttttatttttctttacacagaaggctagaccatcaataatacaggtaaatgatcctttttaaatttgcttttatatttttccagctatactttctgtggaatagtataatactgtcaataatgtgctttattctaggatactgtaacactttgttcctaccctttcatctttgatgcccaagccaagaccaaaatgttacagacagatgctgaactacagatgcaggtatcatattttagaaattatttcttctttttactgtgtttctcccattctagacattcagttgtaattttttctagtaggagaaaacatatttggttgaaattccattgtaattcttaaaactgtttgaaacttttcagtaattttgtgttgaatatmacacacataggtgaatacacatttgtgtagattagagattggcaaaaggatgacttagtaaatgttttaagctttgggaaccgtatggtctctgttacaactattcaactctattttagcacaaaagcagtgatagacaatatataaatgaatgagcatggctatattccaacaaaactttatgtatgttgaaatttgcatattatataatttttacatgtggtgaaagattattcttcatttaatttttttcacccattaaaaaaatgtagaaaccatgccgggtgcagtggctcatgcctataatcctaacactttgggaggccgaggcaggcttatcagaggtcaggagttcaagaccagcctggccaacgtggtaaaaccctgtctctaaatacaaaacttagttggccgtggtggcacccacctgtaatctcagctacgygggaggctgagacaggagaatcacttgaacccgggatgtggaggtttcagtgagccgagattgcgccactgcactccagcctgggcgacagagcaagattctgtctcaaaaaaaaaaagaaatgtagaamccattaatagctcaaaagctaagcaaaaacagacagaaggctggatttgatgtgtggggcctcagtttgctgactcctgacatagagaattaaatggaacttgggaattctttgttgaataaaaacttgttatagagatttacttaataatttattttaaatacacatttttattataaagtataattgattttgacaagccacaaaaacrtttgtgaattagcggctcaaatcctccacttcctaccattggtagatacagatacataacttcatttatctttccctctccatctctctgactgtctgcttgtctgtctctttccagctcgactgcatctatctatatatatgtttgttttcatgttgctatatctgtgatattgacagtttagagattttcaagagaaatgaacatttttcaaagaatarctctttttaacaagtggttattagctttcttttcctgccattttgaaagttgtggtttttacccactttctaccatgtttcttcaagcatgatactattttagtattaatcagctagtttaagtcactttcctggacctgattatagatcatatgattcataaactgttttagttaatttctgtgagtccagattagaaagacttgagtgctgtgtaaacataagtaacttagaaaatctgtggaagttaagagggaaaaaaattaacaaaatggagatgcagtcagcgcccccaagtccagaagcacagctgactgctctcccaactcacacgtgtgctctgagtaattgctttcttgactgtgccattccaggtggcagtcaatggagccaacctgcagaatgtcttcatgcttctcaccctggagcctctgctggccagaagccccttcctggtccttcacgttcgcaggaacaaccttgttggagatgccctaagagagctgagcattcattctgatattgatttgaaaaagcctctcaaagtgagttccttcaggatattcctctaaataccttcgcaatttttctttgaacagtgttgattaagcagcagtgatcttattaaaattgtggggtgcagccattctttcattsattttgcaagaatttaatcacctmcttttgtcaaatcaccaaacagaacacctcaatgtaacattggataaaaatgccagtggattatttgaaagattagagtgctttctttgtcttctgctgtctttggtgtaccagttctagctctatcaaaaacaagcaaacaacaacaraaacgaaagctttgactaattaccactattaagctatcatttaggaagattgtagatatcaaagatttaagagaaagaaggtaaaataggaaaatggaaaggtagtaaaatcatctgggaagctattggcctattatgagaggcacacctagtacctgtaaattattaagtgaaaaaaaatttctctctccatatatcatgcatatttccagggcttagcataatgtttggtacacagtaggtattccagaaatacttagtgaattatwtgaaattgtttaaagtcattcatcttttccctcagacaacttccatatccctattgctaatcttgttatgagttccactttcagaaatgtaataggcatgaaatgaactgatcatctccataatatttttaccctttccaaaattcctaataagtagcatcagtcgtatcaatctgcctggttgttcttcccagaacttctgggttatatttttgacacagcttttctttttgccctgttttcaataggtaattcaggtgaggcagttcttactttgtagcagtattcttctggcatctgtgtaatccaggtcccagtctctgtcccatttttactcttgtcctgctctaggcaatcttgaagacagccacaagtgtaagctttgttgaatgctgtttttagttctctgcccgagtcattatctatgaaatggggatgataatagtaccctatgcataaggctgttctgaggattaggtttacagagtttaacagctggcatgtagtaaactccatgtcatttgttgatttgctgtagttgttactgttgataaccattatgtatccatcatgcccacttccactccctcacagagcccatgtctgtgtctgattagaataccctcttctcttctacatgcagcagttacttcaagaaccctattgagcgtgatttctcccagaaagtgttcttttattcaagttaaatgaaaaatcatttttttctatgtgccagaatatttacctctcattatatatttgactctttaaaaataaaaagtattctctgcttcttttatgtttgtctttctgcgcttaagtagatggtagacctttttttttttttttgtcggagtttcgctctttgttgcccaggctggagtgcagtggtgcgatctcggctcactgcaacctctgcctcccacattcaagcgacactcctgtctcagcctcccgagtagtggattacaggtgcccaccaccatgccaggctcatttttgtatttttagtagagacaggttttcaccatgtttgccaggctggtctcgaactcctgacctcaggtgatctgcctgcctcggcctcccaaagtgctaggattacaggcgtgagccaccrcgcccagccaatagatggtagactttctaaggacacatggtaaatttctgacttcctttgtatcccttgaagcacctagtaaaaattgtrtgtatctataagtaccttgctaaaacttcaccagcaataatcaacagacacaccttgcagttttcattgcatcagtgtgtattctttgttatgctttccttcctttgtcctgagtttagaaaatggtctgctaaaaagagataaaatgtgtcatagatttcccggaagcattaattctattctattattttaaggtaatctttgatggtgaagaagcagtggatgccggtggtgttacaaaggaattttttcttttgctgttaaaagaacttttgaatcccatctatggaatgtttacctactatcaagattcaaatctcttgtggttttcagacacggtaagtaagtggtgtcacaattwaacagatggattaaattaaactttctttttgttgtcagaccaatcccctracttctaactttgcaaaggggaacataacaaggataataattcaaaatgtttataagtaattaaaatgtttatccagtcttcatttatacttgtttccaagacctcatagtgcattttgtgagccttcagtcccatttccatttctagtaggtaagatccaagtcttgttatctgagaagggtaaaaggaaactgtgataaattggttttgtgacatatggaaggtcaataatcaaatatgtctgatattaataactatgataatatattttcacacacatgtgcatgcacactttatttttgaaacttcagtaggagagctaagtttttaaaggcgttctaatttcaatcagactgtcatttacatttttttctatgagagttttcttcctagatctgcaccataccaaaaggtagccactaggcactagccacatgtggttatttatatattatttatttaaaagtaagtaacagcaaagattcatttgctccatagtactagccacatttcctgtgcctagtagacacatgtagccagtggctaccatataagatgggacagaatagaatgtttctataatggctgaaagttctgttggatggccctgctctagatgactgtgagctgttctctgtatcactaggtacaaatgcttaactctgtctacattgcatctttaagggataacaacttttgtcagggtgtttctttgctacagaaggtaactaaatattaatgagacctttattcttttattttgaaaatattttgagggaaatrgtagaatgtttgaaggccagaaacattgcatttctttttaacacatttgtatgtgtcctaaaaagtgttttgtagagcacaactggtttcacttgattggtataacctgtggactagctatctacaactccactgtggtcgatctccacttcccattggctctctacaagaagttactcaatktaaagcctggcttggaagacttaaaggagttgtcacccactgaaggaaggtacaaagctaaaaggcgattggtatctgaaactgttgtggctgcctctggcatgaggattaaaggttgaaaataccatctgtacaaatctgagtttattgcatcctgtggttagaccctgttatgtgtgttttgtctaagatgtagctgtgcagctacttgcttgagacattgcctgtgttatcggtacagtatcggtatccgaggggtattagttccaggacaacctgcagataccaaaatccacatgtgctcaagtcctgcaggggccctagaagaacccatggattggaaaagttgaccttccatatccttgggttttacaccctgcaaatactgtattttctttctttaattaaactgtttttgttgttgaggcaaaatagatacacatattttgggggtacatgtgataatataatacattatataatttgtaaagttcaaaccagtgtaactgggatatccatcaccttaaatatttctctttatgttagaaacactcgaattattctattttgaaatatacaatagattattgtaaactatggtcatcctactgatctatcaaatactaggtcatatttcttctatcaaaatgtaatttgygcccatcagtcaacctctctgcaaatactataattttgattggcctttggttgaatccatggatgtggaacatgtgaatatgaagggccaactgtattttattttttaaactgccaaatagtgttttgttatatggatatgccacattttatttatccattcatcagttgatggacattgggttgtttccagttttgactattatgaataatrctrccatgaacatttgtgcacaagtttttgtacaaatgcaagttttcatttctcttggtatatgcctaggagtagaattgctgagtaactctgtatttatccttttgaggaacttccacgatgttcccaaagtagtagagccacattttttttatatttatatttattttcattttattttttttaaattatactttaagttttaggrtacatgtgcacaacgtgcaggttagttacatatgtatacatgtgccatgttggtgtgctgcacccattaactcgtcatttaacattagatgtatttcctaatgctatccttccccgacccccccaccccacaacaggccccagtgtgtgatgttccgcttcctgtgtccatgtgttctcattgttcaattcccacctatgagtgagaacatgcagtgtttggttttttgtccttgtgatagtttgctgagaatgatggtttccggcttcatccatgtccctacaaaggacatgaactcatcattttttatggctgcatagtattccatggtgtatatgtgccacactttcttaatccagtctatcattgttggacatttgggttgattccaagtctttgctattgtgaatagtgccgcaataaacatacgtgtgcatgtgtctttatagcagcatgatttataatcctttgggtatatacccagtaatgggatggccgggtcaaatggtatttctagttctagatccctgaggaatcgccacactgacttccacaatggttgaactagtttacagtcccatcaacagtgtaaaagtgttcttatttctccacatcctctccagcacctgttgtttcatgactttttaatgatygccattctgactggtgtgagatggtatctcattgtggttttgatttgcatttctctgatggccagtgatgatgagcattttttcatgtgtcttttggctgcataaatgtcttcttttgagaagtgtctgttcatatcctttgcccacttgttgatggggttatgttattctctttctggctcttaaaattccttttattcttgagtttctctgtattggttttgggtcacatcagatcaagtatataaaaggacaactttaacgggagggaacatctttttgtagagaagggatactgatgaaggtaccctccataaatgagagtatccctctcatataggacaccaatactgagaaactataaaggatgggaggacacacagagtggaagaaaaaacttagaagtaatactaaaaagtggcacaggagacccagacagtgttaattttttggtaactgaaagaaaaggctagagagcaacagaaatgtgtgtcccttactttgcttatgtggctgagaattatgtatttcaagtaatgactttggctgattaactggtggcagatttaaattccacactaggacttctctttccaggcaactcttgatagaattgcaagactggagctcactaaagaagaaagtgtgaatgagagctagttataagaatgtattctcttgagagctgggatatgattgttgttgccataaacatattcttcttttaagagtactttttttcattattctttagttagtgtgacagagataataaagtgtttttaccaagcttgtctaaccctcggcctgcaggctgtgtgtggtccaggacggctttgaatgcagcccagcacaaactcacaaactttcttaaaacatcatgagatttttttgcagtttttcttctttagttcattagctgtcattagtgttagtgtaccactgctcaaagaartaagagacaacgcaaacaaatggaaagaaattccatgctcatggataggaagaatcaatattgtgaaaatggcctacttcccaaagtaatttatagattcagtactattcccatcaagctaccattgactttctgttcagaattagaaaaaactacyttaaatttcatatggaaccataaaagagcccatatagccaagacaatcctaagcaaaagcaaagctggagacattacgctacttgacttcaaactatactgcaaggctatagtaaccaaaacaacatggtactggtaccaaaacagatatatagaccaatagaacagaacagagacctcagaaataataccacacatctacaatcatctgattttcgacaaacctgacaaaaacaagcaatgaggaaaggattccctatttaataaatggtgctgggaaaactggctaggcatatgcagaaaacagaaactggaccccttccttacaccttatacaaaaattaactcaagatggattaaagacttaaatgtaaaaacccaaaaccctagaagaaaaaccctagaagaaaatctaggcaataccattcaggacataggcatgggcaaagacttcatgtctaaaacaccaaaagcaagggcaacaaaagccaaaattgacaaatcggatctaatcgaactaaagagcttctgcacagcaaaagaaactatcagcagagggaacagaaaacctatagaatggggaaaatttttgcaatctatccatctgacaaaggtctaatatccagaatctacaaggaacttaagcaaatttacaagaaaaaaacaaccccatcaaaaagtgggcaaaggatacgaacagatgcttctcaaaagaagacttttttwmaaaaaatatggaacgcttcacgaatttgcgtgtcatccttgcgcaggggccatgctaatcttctctgtatcgttccaattttagtatatgtgctgctgaagcgagcacaaaagaagacatttatgtggccaacaaacgtatgaaaaaagctcatcatcactggtcattaaagaaatgcaaatcaaaaccacaatgagataccatctcacgccagtcagaatggagattattaaaaagtcaggaaacaacagatgctggcaaggctctgaagaaataggaatgcttttacactgttggtgggagtgtaaattagttcaaccattgtggaagacagtgtggcgattccacagggatctagaaccagaaataccatttgacccagctgtcccattactgggtatatatccaaaggatttataaatcattctactgtaaagacacatgcacacacgtatgtttattgcagcactatttacaatagcaaagacttggaatcaacccaaatgcccatcaatgatagactggataaagaaaatgtggcacatacacaccatggaatactatgcagccataaaaatgaatgagtttatgtcctttgcagggacatggatgaagctggaagccatcattcttagcaagctaacacaggaacagaaaaccaaacaccgcatgttctcacttataagtgggagttgaacaatgagaacatgtggacacagggaggggaacatcacacactggggcctttcgggtggtggaggtgggaacgggagggagagcattaggacaaatacctaatgcatgtggggcttaaaacctagatgacaggttgataggtgcagcaaaccaccatagcacatgtatacctatgtaacaaacctgcacgttctgcacaagtatcccagaacttaaagwaaaataataataataataataaagccagtctaactgggtgaaaaaaagtaaagatgtgttttcttctatatatattttatctgtgtactaataataaaaccagacttacttttatgtctcttcagtctcaaaatatttaaaaagaagctcttttttcactggttaacattaggaagaaggtgaacaactatgacagttttcttggcttgtgaatttttggagtgtctgaaatcaatcttttaaaattatattgttgttgaagacagcagtgttttatgctgaattacacagagataatgtatttttatggacacatttggcagcttgttatgcctgtgcaatgcataacctctcaaaacaacttcttttcctctctccatctcttaaaaaaaaaaaattagtgtgagtgtattttatgtgtggcccaaggcaattcttcttccaatgtggcctggggaagccaaaagattgggcacccctggtctttaccatatagagacttctgcattaacaagtaagccactaagattcctgtggatgtggtgactttgtggctttttaaattttgtctgatggaaggattattttactaatgcataagccggtgaagctggctggagggcccctgcaataccatctcctcatttatatgtatacacacacacttgcaagctacaccagagttaagaggacacaagtatgtcagattaaaaatccatctgattttcttttcaagtctaataagatttgtcggtaagaagagagaataattaatgaatgttttataggtctagtgccataattctctgcaaggtgtaggtacatgattttctgtccgtccggatttatgtttattccagaatcttctttcatagtttttccttggaaatggtctggacatgtaactgmagtagaaacactgttgcagcagtgtctgacttgccacttttccttttctgtcattctatgattaggagtctccaagagcttttrgattacccyggggaggatgtggaggaractttctgcctcaacttcacggtaagaatttccacagtttacttaggattgtggctgtctctcttaccatctttagagtgatatttaacattagttcttcttcaaatcatagaaaaaagtcagagacttctttgaatcaaattattttagtcatagtgtcttgagtgttataggggttcagtgggcgtgttgaataaatgaatgaatgattaatctgttatttattgcatttattggcaactccatgtcctaaaacaaaagatgttttttaacctgctaatgttttctgactyaagttctgattattctcccactaattttctgtaatagtcatgaaactacatttgttcctaaagcctctctcagtcatttgagttctagaaagatgaatggttaacaaaattgaaatatttcttttttccaccttaaatatagatctgccgagaaagctatggagtgattgaacagaagaagctgatacctgggggagataatgtaactgtgtgcaaggataacaggttagtcctgaccttggactgttgcagatactgctacttcatatttctgcagttttacatttaagaccaaaataaaaattactttttaatattaataccttcttcagaggaggtaagtaagggtgatagggcaataatttayagattttaaataatttttaaagcagagcaagcacccggcctagattcaggagatgactgttttagttctagagctgcatctttttggctttgactctgagcaagttacgtaaactggtttcagttttctcatctgccaaatggggattataatcactgtgctctcyacttcatgggatggttgtgagaatgaaatgagataattcacaggaaaatactttggaatgaatggactcccagcatctagcacagagtttctagtatctaacagagtgcctggcacaaaaatactcaaaaaatatgtgttgaagaaatgaattttataaaggtgcttactatcactgctattttactgctgattgatttgtcatagagtctggatcataacaacaaattcaagtacatttgatttttcaggatgattcataatctctgagttaactctttagaggagagaagatactcaattttgcttacttttatattaaattatgctaatctgcatgaaatcaatttactttacaaacactgagtgcccactgtgtgccagccatagtgctgggtatagagggtgaataacttctatccttagaagctttgggattagttgagaagggtcaatgtatggaataattgcaatagaatccagtgtatgtgatagaagttgtagcccaggtgccacggtactagggtaagaggctacaacacttttatcagacactaaagaatgcaagttggaggaaacattttaggcaccagatgagttgggactctgcagtttgacacatgatagagaatgttgggtacttgtggagtgggtactggtgtacggatgaagggagactatagtagcatcagagtggaggttatcaaggccttgaacggcgcttggagtagaacatgattggtttctattttagaaagattactttgggggtcctgtggaaatagaccgtgtgcagggatacccattaggaggcttttgaggtagctcaggtaaaggatgttaacagccagaatgaaggcagtgggaaacagagttggttatataaccaaataggagctagtgtctgattatatatggatggtatgagagagttatatattgataataatgctgaggtttctaattcaaacactaataggaaacagagtctataaagcaggttcaagggaaagttccattttgaatatattgattttgatatgtctttgtgatacccaggtgattgtgtttagagcagaaaatttatatatctcaataaagaagtcttatatgaatattttttaattagttatgtgagcctcaatcactattaaatttgaggtcgcttacagcaagaatcaacaagaaagaagtggtgaaatgaaaaacaagagcaaggaaaacgtaatttcttagaggagctatataagttagaataaaatgcagactcttgaggatttgagcataatttgcacataggctagcattgaaacttcctggcttaaggaaagagcgggtagggggtgggaaaggtgagagaatgacagtctttctttggaagcctttagagaggaaagcaaggtttcatttaagctatgaaaaaagatacagatgtggagaaactagatgctgtttgtacgcatgcaggaaaattaagtaaaactcactctggacttttattggcttcttcctctaaatagttgggaagatgcaattggagatcctattaaattcactctatccaagtgatctatcttgattttctttcataatctttccttttgaaaataggaatgggctggatgcagtggctcatgcctgtaatyccagaactttgggaggccaaggtgggtgaattgcttgagctcagaagttcaagaccagcgtgggcaagatagcaaaaccaagtctctacaaaaaagtaaaaaaaaaaaaaaaaaattagccaggtgtgtggcagtgcacatctgtagttccagctactcaggaggctaaggtgggaggatcacttgagcttgraaagtggaggctgtagtaagccatgatcatgcctctgcactccagcctggacaacaaagcaagacctcatctccccccgcccccgccaaaaaaaaaaaaaaaatattgacagacttcttcttccatccttgactactttttttttttttcgagacagagtctcactctgtctccaaggctggagtgcagtggtgcaatctcggctcactgcaaccttcacctcctgggttcaagtgattcttctgcctcggcctcccgcataactaggattacaggcgtgtaccaccatgcctggctaatttttgtatttttagtagagatggggttttgccatgttggccagactggtctcgaactcctgacctgagctgatctgcccgcctcggcctcccaaagtgctgggattacaggcatgagccaccgctcctggcccatccttgacattttaacaaacgactcgaagctagtatgatctcatacatcattcattaaccattttttttttgtcatgttaaccttccagactatccaagaagcctcagctttgggkaaagtgagctatagtrtcagagttgagtgaaatgatgcagaagccacccagacacccaacaaaactggcttcagttgatggaattatcttggctctagaaacctaatatagaggctagtcttgattcaagtaagaatgttgcaatcaaaacccttgataagaatctcttggggctaaaagcagtttcctttatataacattggtacttttgttaacagtaaataatttatcttcaggatgtttatttccttaataagamcaggctttttattccatatagtcagataatgtttttagaattgggaaatttatggcagatcataaagcagatttgttagcccagctgatttcccttccctcctggttttggggattgctttataacattgtagatgcgtgtgagtaygtatgtagatacatacgtaacctttagtctttcaaacaatgtcttagcttttgcattaagtttcagacaagataatgtgtgcatcatttgttagaagctaacaatgggataggcaagcatcctgaggaaggggaacattcagagtgtcctcatcctctgctgagtcatcatagtgctctgtgagtatgatacagtggctggggaaatgaatgacctagtgcaggaataggcaattggcaatgtagtctgcaattgaggcagtggccagaactgccttattactccttttcatatctttgtcaagttatttctcttagcatattttttgtctctgtcttttttgttctctttctgagtctgaatttttctccctttctgtttctccatttctctctccctgtcactctcactgtctttctccttattcaacagacatttctttgaatcaacaattgaattgactcaacagttgtgggagaaactgcaggaatagtaaaatataacacagtttgtttagggtgataagctgtatccagatgcaaccataaatggaatatgaagactaaattgggtggttgaatctgaaggcgttcagagaagtcagcttggacagatgcatctgggaggacagatatgggatagagctaagtttggaagcctactaagatttggatactagaaagtagagaagaggatataaacatgaaaggtgctctgtaaagggatggaaaaatctgagttgtcrtttcagacagaaattttgattgcattttactgtgttcaagatgtacagaacagcttctgtactaggtagaaatttagatttcrgtttttcagagtactcattgaatacactgtgaactcatccatgctactttaggcactgatgtayatgtctgtgtcactcagtgacaggcaggagaccctgttgctgtcacagttacctgtttgtctttgggctgctgtaaaaaagtacgataaactggatggcttataaacaacacaaatgtatttgtcatgttctggaggcyggaagtccaagattaggctgccagcatggttaggttctggcgagggccttcttccacgttgcagactgctgacttctcgttgtaycctagcatggtggagagcagcgttgggaagcaagctctcatgactcttataaggacaccagtcccattcatggttactgctgtactctttactatagctgttttggttagggaccaccagaaaaagacatgaatgaatttttttttcttttcattttatgctgcacaaaatagaaatcttaccaacaaagtacattgaggtcctggtaagaaaggctgtatgaagttrtaaaagattgatcattatagtcattatttccttggctatatgccataatgtagtcattagcagtcctaaattatatgactaagaaaatgaaatagctgtaagaagaatacctactggccttttaacttaggcagttgtatacacagatacttctggcattgaggctgtttttgttaacagtaagatatttgctggcattgctgccccaggggaaaatgccagaggaataccaattctgtattcataatttattccatttcatttggttttaaaatgctttctatccttggacagaacctacacagtcaaatgagttgtaggcatccaggtaaaagaacatctgtggctgattactggtggctgcatcatagacaaatcttgccaccagctggtagtcacatctggataatactatatcacatgactactcatggttaagcatttcttatggtctataatatggtgttaattaccattagtgaaaaacccatatgtcattctagattccctaaaatttaccttaatttgatgcaatcaaattaaatgcaattgctgtcttcccattttccccatattaaaaaagaaacagatgacacacacatggggctggggggtggggcagtggggggcagagagtagagtaaagagatcacatagtaagaaatgccaaacttaaggtaagwgcttcaaagggcatctagattccgtagtgagaacctgagaataaaactcatgcatgacaaacacttcttgctccttaagatctacttcaggaccgctggcagacttcagttgatctttcaggatagtttctgagggatgcagtctttaagatctgcattgtatttgcactggactattacaggaactgcagaattaaaatgccagtaacacttcytgagtgcttaccatgcatcagacactatttgaaatattttacatgtaagactccccatttactgaggaggaaactgaggcacagacaggcataagtctcttgttcaacgttacacagctagaagtccaggattctaaaccagagccaggattcaaagccaggtggtttgagttagactgcgctccatgggtaccagcatatggcctctcaggggctaaggctggggctcaagagttcccatcctcctttcgccctaggaagaaaaatgactttgaagactttgctgtttttcgtttcaggctgactaggtaatgttttcaaaaagcaaaattgtaatagttaaaaacataactaatatacatatggaatggaatgtctgaatttttaaacttaggtgaagacaatgcttatatttaaaatgctatttcagagtactcatgaatgcccttaatagtgactgccatggtttgctatgtgaatgtgtatttttctgtttcttcactgttgaatatttggcttgtttgtatgttcttttttattcctcttttttctcttcccccccaccaccatttttaataagactatatcaagtatcttttgtgtataaaggattttgtgcctttaaatttgctttttaatgataaggtctcaggggtgaaatggaattaaaatgtataacatttgaatttgttggtagatatttttgataaattgattttgctaatgaattatactcccttatatgtcattatcaccatttcatccagtccttagaaacatggtgtgtattctttaaaaaaaaagttgcatttctttcacacataggctactttacatagtctacacagtattgatctattttactgctgtttacctctaaaatatttgtttaaaaaatgaattaactagaaggtggtggttgcacagcattatgaatgtacaaaacgccactgaattgttccctttaaaatggttaattttatgttatgcaaatttcacctcaataaagtgtgtacatgtgtgtatatgtgtaaatgtgtctatgtgtatgcattgagtgtacattctcaggcagagagagctgccatgccatttttcacagtaagcatcggcatgccagttttctgcgtaatactcagagagttggttgagtgtgtattgcatgcttcctttctttctgccagttattttgtgctttgttgactaattttggcctataataggttaaaatggtttatgaatgatagtgtttgacctaccttgaagcaagggtatcctgttagatgttaacatgcaggttttagggttgccagagaaactatcaaataagcagtccaggaaacaatataaagattagcccagttaggaagtggcagaaaycgcttgacgtcacaaacatccctgtatccttagagaagtggccaacaattctctaagctagaaaaccccacagctaaaatcttatcataaacaaaagaaagattgctggccagagcacatagctaggaacacttgtctctagaccctgccagagccccggctcacctagtgctgcaggttcaggaacacgcagcattaggtgagttctttctgcctcaggcagggtttgcagtctttcctctttttagagactctgctgatgtcctttatgtatttctctagtaggacttaataattttcatatgattcataggaactcttcattatgtttatgactattaaccctttgccatccatatttattgtaggttttatcctctgtttttggttttgaaaatgtagagtgtgtctttaactctgtgatttcttaatttttgtgttgtcatgtgtgttatttcttttggtcttataccactctaatcctagccattccctgtccagtaattgatatttaatatattttcttcagttagtctgtagtctgaggtaaaaatmtaaactgtttccaaattgctaaaggttttcttagctgttcttaaggtgaacattatggtaattatattaggttccagatccagtttgagttttgattagaattgtgataaaagttaatttgggaagaactgacgtttttgtgatattcagtcttactatccaaaggcttatgttatgtttgttttttatttttacataggtcatacacatttcttattagaggttttataaatgttttgatttcttatttttactctgagagcctttcacatatattttgatcattattagtgcctataaatggttattggtttttgtgtatttatctgataactggtcagttcatcaaacttattaaattgaattgttttccagttgattctcttgggttttctatatgtaaaaaacatttcccaatacttatgcctcttagttgtgtttcaatcgtttttgctttttactggaaccagaaaaatagtaaaatgatagtctctctcattcctggatataagaaatcaatattaaattttattagattttttctctattaagataatcatatgattaagataatcagaactttgtatgtaacgtattattctgattttctcttttggttggcctgagcataatgaagattaactttaccttaaggttgtttgtactcaacaatctgttgtgattagcaacaggtcagtgctgccttccattccctaggataaagcaatataattttgcttctttgtaattttaacccttcagggaaaaggaagcaaatggcatctgattttttaatttttctggagtccagtttttaaaaaaaactttctgcttcattcagaatgaagcaaacataaagttgaaatagccttttttatcctttctgggagatgataaaaacctgatattatattgaggaaaccaaaacaagatagtttatttaatttcctgcatttctgaattaaaggccacattcttctctcataataaggaatcaaaaacatagggagggatgtagtgatgtctctttctcccattttgtaacaggagaggaggattgaatttccaatcactgtctttatctttcatgtaataataatagctaagaattattcagcacttaccatggtttggatgctattctataggatttatatgtattaatccatttgctcttcatagtaacccatgaggaagggactattcctattcccttttgtagatgaggagaaactggccactgagagtattagctgagttgcctaaggtacattactaataggaggcagagctgggatttgaatgcaggcagtcacagtaccgagtcttttatatatattttttgaaaatactgttttattaacaccacagtgataaacaactttaagcttatgtttctttatagatcactggctcacacataattcaaaacccacacagaagctaagagtctttacattaaatatattcttcctaaaaatccttactgtatgcatctgtcctcaagcagtaaaatttgattatgcaccattttataattaatatgtcacatttacatagcaaaataatgaaggcacagctaatacaagcaaacttaaaccctttctacttctgagctgggggtaggggcacacacttggattggttcttcaagtatrtattttttccaaacattagcttcagtgaagagttmtgatgattttcacagctamaccctaaaagctacatgacagaaagacgtcacaaggcgcaaagtacataacgctggatacacatgctttacataatttgctacattctacatctcttcaagtaaattaatatttctaaaacgctaggtaaagtgatttaatacttaaacatatttggggtattttttacgtgtttgtaaatagacagtactaagaaaacacaaacatgagattgtaactaatgaatacatatgttgacagtattttacaggttttacaccctccttcttggaaccatgttgtttctctaaattcaaatactcaaaacatttttcagaacttgaaatggcagttttcctggccttattaacagtagtgtcatgatctccattgcaatcttcctcaatgccatcaatctcctgtgaagtgtaaagctgatgtctgcgttacaaaagcaaagtctcaaagatgacgtttttcttgggttctgccttctctgcactgcgaaatgtcatgagtaaagaaatttaagaattaagcactgagaacgtgttcagtcatggcttgggtgttccatgtgtagcgtatgctgtgtgatgaatgggtttcaaagtgacgttctttacttcgcatctgctaacaccctttgtaaacctcaatcctcagagaagagaccatgaaaacataattttgggtttaattcagttttctttaacaccttttgatatatttattatgttcaaaatgaaagtcaaatttgaatcgagctggccaggatctaattgctttaatttaatctattttaggaatgtcagaataaattcacattgtattttggtcaaaaacctgagcctttttaagtccatcgatattctgggaaaaacaaaaccaggcttttttcttcgtgggctttctcttcatccatctctgccccccttacttcttggcgtcatcaggcatctcggcgtgggcatcgtcatgtttggcccccgcggcagcctctgccgcagcctcctcctcctcctcgtcttccccctcctcctcgtcatcctcgtactcctcttcctcctcctcctccccctccaaggtccatgcacacccctccatctcgccggtgagctcttggatcttggcgagtaggggcttatagatgtcattatactttttttccagagcctgaaattccttatcaaatttggcttctatcttatcgcatcgcttctgcagctttttgagggccaggactcggcatttcaccgaattaggcaggctctcgataaagtcatttttcggctttggggcattctctgcaggggtctggggctcctcagccatctgaccagccgcgctgtcagggtcaccagccgcgctgtcacagtctccaccctgcgcaccgccttccgccattacctcctcygccgctgcctccgccgctgccgccgcctggctaggctccgcaggcccctggttttccgagtcggccatgttagaggagaagccgcagaggtctaggagggctcccgcagaggccctgcacccgagctggtccagagagatcttgcggatgcggcaagtggcggtgacgtgcggccgcgggaatgacgttggccgcggccccgcctcctgctttcgcggcacttgactggcttcccactatcagctgacggccgtgtgctcatactgcaccagattcctcctgttgctaccctgacatcttctgggccctcaacacccgcctgttggacagacaccctgttcccagcccacccatgtacccacccctgtagagctgggctgggagtgtcagtagctgcccgaggtgcttcttcaggaactgcatagatggcctcagaccrttttccgtgtgctcctcacccccatccaggcccttctacaaatgccagtgcatatgtcttcgctttcctctgcatctctctccatagctggcgtttgatcacctcttagattcctccgcattcctctccatgcagtggaggaacgggcaagctggctccattccacccctttggggacctggggtgcatgtgtgtggatagggcagcttgcatatccaagctctgtacctatgtgtccacccaacacccccttggccatcccacacacctagcggcatatatcttggtggcaaggtcgtctctcagcaggactmccctggaagcagttttggagccatttgggtaggaaatctcagagctcccggtgtcctggtgtgtgttctagaagatcctacagaatctttggcctgtgggaaggactaaagcttgaggagggctgaaaaaaagcaagtctttctaaagcatggggcccagggccaaggccccctcttrtcttggttaaagcatgtgccatctatcccaccccgctcacattcgtcttccctgccttcccccaacaccgtctgcttccctgccttccccactatctgttttcacacctttccacaccacatcttctccctccctcctgcccctcccccgcactgacttatgccccaccttctgcccatcttcttccccgccttcttccccactcactgcctccttcctcaccttccccccgccgcactgtccttttccccaccttcctcaccctcttcttccccaccctccttaccctcttcttccccaccttcctcaccctcctcacccccttcttcctcacccactgccttcttcctcaccttcccccccaccgaactttttcctcacgctcctcaccctcttcttcctcaccctcttcaccctcttcttcctcacgctcctcaccctcttcttcctcaccctcttcaccctcttcttcctcacgctcctcaccctcttcttcctcaccctctttaccctcttcttcctcacgctcctcaccctcttcttcctcaccctcttcaccctcttcttcctcacgctcctcaccctcttcttcctcaccctcttcaccctcttcttcctcacgctcctcaccctcttcttcctcaccctcttcaccctcttcttcctcacgctcctcaccctcttcttcctcaccctcttcaccctcttcttccccaccccctagccccaccctcttcccacccacccccagccccgccttcttcttccccacccacccacccagccccaccccactcatcgacccagctccaccctcttcttccccaccgacccacccctaccctcttccccacccacccacccctacccgcttcttctccacccacccacccagccccaccccactcatcgacccagctccaccctcttcttccccaccgacccacccctaccctcttccccacccacccacccctacccgcttcttccccacccacccacccagccccaccccactcatcgacccagctccaccctcttcttccccaccgacccacccctaccctcttccccacccacccacccctacccgcttcttctccacccacccacccagccccaccctcttcctccccacccacccacccagccccaccctcttcttccccaccctgcccaccatcttcttccccacgatctgtcttcttccccaccttcccccacggtcttcaccaccttcccccaaccgtcttctttaccctgctcaccatcttcttactggctcaccatcttctctgccttctttctcactcccatatatcatctcttttgatggctacagctgccttgagattaggaatgatgtttctcattttacagatagtaaacttagaagcaaatacagtgaaatcatcttactgcatgtatcacttaattggcagatgcaggggcagaaaacaggccttttgacccctatagtatggatgttgtgacagactttaaaaaaaaaatcccacattttggttaaattcatttgactaacttaacttgcttaaaatatttagggcatgttcatctttcaagatttttattttcctgtctcaacagatcttaaaacttagtgttaaaccagactgttttttaaaaagtctggcttattgaggtatcatttacataacagtaaaatttgtccttttgggcgtgctttcacaagcaaatacagtaatgtaagcrctgtagtaatcaagatatagaacagtaaatagtcccctaaaagtccgttgtggcccttccccagcatccagccctggtgagcactgtgctgttctctgtctcagtacctctgttttttccagaatgtcaggtaaattgaatcatatgaatgtagccatttgagcctggcttttttttttactagcagagtacatttgagattgatttatgttgttgtatatattagtaaatttattttttattattttttattttactttttattattgggtagtattcccatttgtggtgtttgcagtttttcataattgtgaataatgctgtgatcattcatctacaggtttctctatgagcatggacttttatttctcttgggtagacacctagcagtgggattgctgggtcatacagtaaatgtacgcttaacttcataagaagctgccacactgtttcccaaagtggctttaatctgtttagtgttgctaaaaaggaagaccggaggctgctagctaaaaggttcaagattgggcatgtagatggtgagagtctcaggctgcttcctgagactgttgagctatttctaccaatagtcycttaagtgaaatctaggtttttctatcaagctcctcaaaactctttcaggctctacctatttcctcatttcaaaggcacatctgcgtttttaggtatttgctgttgtagtactgtacttcttagtaccgaaatctatatgtcagtgttctccagagaaacagaaccaacagggtgtgaagccgaggggggtgggggcaaggagggatttattttaaagaattggttcatgtgattgtgggggctgtcaaacccgaaatctgcagggtaggctgtaaggctagaaattctggcaatagttaatatttaaatcttgagtccaaagacagtctggagggagaattctttcctctytggaggacctcaagtctttttctcttaaggccttcagctgattggatatggcctacccacattatggagggtaacctgctttactcaaagtcaatgaatttaaatgttcatcccaactaaaaaaatatcttaacaacatccagactggtgtttgaccaaacaactggatgccatagcctagccaagttgacctataaaattaaccatcacagtctgtaataaaaattgttgtgatggtgtttctcttgggtaattgtatcagaaaaatgtcattagtttagtgtcatgggtttcagagaagtgaggtgttatatacggwgtgagaaactttcagcatcaatgattaacatgcacaataatctttttacattagtggctttattttaaagattgcacagttataccattttaaaaatgggaaaagggaggcttactagttagatacagaagatggcagagcctggatttgaacccctgtctgcctcacttatccactgtattacaccatttgttggctagttattggtgtggatggtgaacatgtaaaaactatctgcttggaggaaacccaataattcaaatgtagctttatgaagtattaaattacagtgatggataagtagtaaataactatcttcatgatgtgaagttttaaaattgtttttaatctaaaatacaaaaagttaatgtgacaaacatttgyatatatgatccacagtcaacaggtatttgcttcagattttttaataaaagaaaaaaattactgataccgctgtacatacccttaattccaaattactgatactgttgtacatacccttaattccattcccctcttcccgcccttctttcttacacagacaaaactcttatgaatttgatatgktttttttatgtttttatactttttataataaacatgtatgttaaaacagatttttttttttttttttgagatagggtcttgctttgtcacccgggctgaagtacagtggcgtgatcatggctcactgcagccttgacctcctgggctcaggtgattctcccacctcagccttctgagcagctgggactacaggcatgcaccaccaggcctggctaattttttgtggagactgggtcttgccatgttgcccaggctggttttgaattctgggctgaagccatctgcctgcctcagcctcccaaagtgctgggattataggcatgagccactgcacctggctagacaaagatctttttacattaatgtctttgtttttaaaaatgaacacttacacatcttatgtatgcatcatatttataatttcatactcataagcaaaatctcatatccataaacaatatgataatactagttaatacttacaaagtaattgttatacaccagccttggtttaagcactcttacatgtattcactcatttaatcctaaagcagtcccatgtgttatctactcttactctcccccattttacaaatgaggacacaggcatggagaagttaaataacttgcccaagggtcacaagctctgagtgacagagctactaccttttataagtagcattgttttaagtgttaaaacacaacttacataaatgccatcatattttactgaacatgcaaatacttgattttcactcagcattgttcttgagattctattcattttgctaagtttagatctagttaattccatcaaagtgctctgctttatggtttccatcatatgactctaccatcttttccttgtccatgttcatattaatggatgtttagtgttgtttctctaaattctctatattgcaagaaaatgctgcagtaaacttgcctgcactcatcttcttgtgcacacatgttagcgtctctgcattacctacccgctagcacagtggcatggtcaagggtatttacattttcaacttatytagatattgacagaatttccccccaaaatgtttatgtctaggttcacagtttatatttccacttgtgagagactgaatattcctatggacaatggccaggccatatataaataaacatggagctgagacccacaatctgcagcaacctgcccgggaaaccaacctcttatctgcaataagcagcccaggaagccagcctgctataagtcagacttgcaggcagcctgattgccatctstctcgataacttctgtaacagtgggcccaaataggccaggatgtgattaataatcagcagcttccctaatttttgttcctacttccaacttagggccaaccagagaaagccaaatacacacccttaaccagtcacataggatgccccacttctagttagcccacctgcagcttccccagactagcagcctccartcagagtgtacctgaagccttccctctttccactgtaaagcttttccactcctctgcttgattttgagtctctgccacaacacaagtgacagtggctgactctcttgctatagcagctctgaaaaaatagcctttgctcttctcatttggttgatctttatatatttccatggttgcgatatggttcccatcatttcagtttatcttcctaccaactgcctatgaggtttctgttttccccacaccttcaccatattgatataatctcatttttaaacttaggccagtctgatgagtgcaaatgacaattcactcgtcttcatttgcatttgcctgattattagtgagatggagcctttatttgagatggttcttcccagaggtaaaggttttataaacaaggagttataaaatgaaccttttaaaacaggtgaggatacaagtatcaagtggtttagctttatttgtttctgaggaaaatggcctagaactgttatcctagactttttattttaagcagaaaaggtcttattattttttccacactaaattttaagcagggcttttaacatgaaaactggaatacctcaggtaaagccagtagtttagttctatatacctggcctgctgcccttcctatctggcttatcctgccttggatcacctgaggcacttggtggaatgttagggctggggatggagagggaggagaggagagctggtaacctatatgatgccttaggatgcctcctgatttgagaatttgatgaaattctattttttatcactcccaatctcagtgtagaagggtaacttcataagctttacaagactttgagctaaatgtattttcttttgtgttctggcaggcaggaatttgtggatgcttatgtgaattatgtcttccaaatctcagttcatgaatggtacacagccttctctagtggcttcctaaaggtgtgtggtggcaaagtacttgagctcttccagccttcagaactgagggctatgatggtggggaacagcaactacaactgggaagaactgsaagaggtaagcacaaaagatcctttaactcctttaactccggcraagcagcagcagcctggggaggtgttcccagagcctggtctcgttmcaagcatactgtggttgagttagatttagaggtgtcctgtatctcagcacttatttcttagcctcaaatgcaaatgatatataatgtccactataatattcttccaagatacattttyttctttttctcttttttggacagactgccatctacaagggagattactcggccacacatcccactgtaaaactattttgggaaacatttcatgagtttccattggaaaagaagaagaagtttctctgtaagtatcagtaatctcaatatggtatttgtctacattttagtcttacatacagtataggatgacatgctccacagctgaggcttaactcatttaaatggtaaagaccaggtaattcactatatgtatgctttttgtcttaatgttatctcaggcacartataggttgttaatccagatctgttgcctaacaagaggggttgcatgaaaggaagaaaagaagcatctcactgatttttcttttctttctttctttttttttttttttgagacagagtcttactctgctgcccaggctggagtgcagtggcgtgatctcagctcactgcaacctccgcctcctggattcaagtgattctcatgcctcagcctcccaagtagctaggactacaggcacctgccaccatgcccggcagatttttatatttttagtagagatgggctttcaccatgttgcccagactggtcctcgtcttgaactcctgacctcaagtgatccgcctgttttggcctcccaaaatgctgggattacaggtgtgagccaccacgcctggcctgatttttaaattattctaaaaataccaattattttatatgtaagttattcaagtattccatttatgaagtcarattgtttggattaacctctcttatctctctagcctttaaaatatattacaaagtatccagatggaactgggaaggtgtgatttatagcagctttattgggctataatttatataccatactcatttaaagtgtatatttcagtatacacacagttgtgaaactaacacacagtcaattgtagaatacattcataacctcaaaaaagaaaccccatacctattagcagtcattctccatttcttcccagctcccccaccagtctttctgtctctatggatttgcctattctggatatttcatgcaaattgaatcatataatatgtagacctttgtggctggctgaatgacatttgagaagggtaataatacctttggaaaggagaatgaattctaatttacatgaacaaattcagccttttaaaaatggttgaaatatttctcagtttgtgtctgtgtgtaatcagcgtcagaaattagctagtgcatagtatggaattttagtcatgtaaaatcaaagcacagggtttrataggcagtctattttgctttataagatggagcatatattagtattaatgtaggacttaacaggttctgctgctcacatgggagcaaggatgagaggaagtggagatcttacacaagmattcttaaaaagagggaccacttctcctctgcctggctgcattggctattgagaagcagtagtggaagagctgaatgacaggttaaggtttgccaagtgagcttgtagggctgtgacattcaagagatgcctgctcatggtcctggaatttccctagaaaatggcactttctgttcattagacttacagaaatgtttgttaactctggagatttttggcaagaaactttatgtatcacagcctcagggaatggcaggttatttgaaagtgcttcttaactaatgattttcttatagtaatttccagcaattcaactatgagagtgttgttcagcactagaaaacaaggagctgtctttctctgtctgtctccctctctctcttttgccaagtcacagtgcatgtcacaagagtgcaatgtctaacataatgtttgggtcagctcttcgggtttaagaaaaatggagacgtggaaaggagagcaaatagatcctaaatggaattccgtagacaaggtggtacaggcatcaggcacttgaggtgagaggagaccctgaggtcagagacttcagtcttcttctgttttccccttaagatcagctcctcttttcctatgacagcaattccttccctctttgattttgtgaaatctaacatttgtgagggtgtacatttgattgaggccttttttttttcttaacggcatctaattttcattccacaggatgcatattggcacataaatgtaattgtacttctcatgcaagccacagggtgtcatgccttcctctcctgttgccagaaggatctctgagatccattttccgtttgcttagctgctaatgccatttctcgttctccccagtgttcctgacaggcagcgatcggattcccatctacggcatggccagtctgcagattgtcatccagtccacagccagcggggaggagtacttgccggtggcccacacttgctacaaccttcttgacctccccaagtacagcagcaaagagattctgagtgcccggctgacccaggcccttgacaactatgaagggtttagtttggcctgaggcttctcagcttgtccagtatttcccttcgttcctcagtgtccacattgaggcytatacagaaaatcatggggagtgatttctatttttttattgtctaagtgggttgggacttttaaatactgagcctkgttgatgtgtttctgggattgtatagcagtaaacaacctttttgaaaaattagaggttggggatggggtgaaaaattggcccttgtatgggaggtgtttttgtttttgttttaaaccaaactacccagtattccttgcacttgtgaatgtgttgcactctgctggatgaaatggcagtggatttttaaactttaatttcccaaatgtctctctcagccctgatgttttctcacagtgcttccttgtccttctcttaacttctcattcctctataagaatgatttagactgacctgtccttttttatctgcgcatgcragaacatcaccttcctctgtacacttggaaatgcctctggcttgttgcagccctcctttaacccaaaggaggaaaggactgcttcagaaactcccaattccaaaaagctgagtctgggtccattattttggcagaactcctaagaatttatgggagcctatataaacatatctwgcttttaaaaagttcttgagggaatagcaactttcccatggctgtgcctatttcctagaccttttaaaagatgtgcagagcagcttagcattcgttgcagctgagcctaattttttcttgctcatccttgtccctttgacaataaggttaattgatagacccaccacctcttgcactctcgcttttggagcaagttgcattaactattttgagtctctatattgtccaagaaaagtagaaataataaatttactttccctttttctrtcaccttatgtcctctaccattttctccttcctcccttcccttattttctccttttcgtaccctgygtcctccctgattttcctttcgtttcttctttattttatcccattctctgttacttgactcagtgctcccttcctctcctctccttctagtggatgcatgcagcctttttttcaatttttatttaaattgcaaaatttttactcagattttttttcctcttccctaattgctaagatttaaggacgttctttattatgaaactttatcacattcgaaatgtttgtttacagtgggattttaggggggattgtgtttaaatcaaatatatgtattttaaaaataatgacatgctcaaccttcctcatcatggagtaagaaaattctacatgattaaagaatccatgtaagtctaattttaaattcctagtaactagagaaaagacttatttatataaaatgaagtatttatgaactgtgataaagcatcaaatcttgatgaaggattgtagatttttgctttttctttttgtttttaaaacttattccaattgctaaattggtagtttttcagtctttataaatacaggattaaaaatatatatacagttatatgaaatgtttattttctatgtgtgtgcatatagttcaatattatgcaataaatttggtgttttaacttaaaactatttcttattgtacttgcagaatggatagcttgcttttagtagaagcattaggtcgtatactcagataatctaatagaaggtcagatttgattcctgcataagaaagtagagccaagtgctgcagaaatggagaagaaagcaggggcaaggagcagatggcattaaggaagaatgaagtttttgaaggttgggatggacgaaaaggtgtttctcatggagagggatgctttagcaaaggctcaaacattggggcatatttaggcaagagccaagaacagtttgaagggaacatcagaggaaataggcaaataatagtaaataatggtaagtaagacttgggagaaagaaggtagatttggggctgaggaactagcctaacactggaactttagtagtagccaagtaggatttgtttcaatgttcagaacttgagggtgataagacctgagccgggtcttaagaaggaaaatgtggatggtctaaatctggaggtattgaggtgggaaggactgaagcagaaagacaggagctgagacagcagtgacagtggcagcagcagaactagagaagagtatctgaggagaggtagggggagtgagtggaggtggtaggagcctgcagggagaaggaggcactaaaggtggatcagagactggttcatttagtgattggtgattgttaggccatttaagcacaccaaaagtttgtgagacacagcaaaaaaaaaaaaaaaagaaaggattttaagtaaattggtaaagcaagtaaaatgtattgttttgccagattaaaaaggtggtttaaaggtggtaaagagaataggagctttccattaataagctccattcaacaaacatttaataatctacataagtgctacatttgaggagttaaaaacaaaccccactacatttaattttgcacagaaattgccaaattattttaactaactttgaggcctcagaattctcatccatgaaatgagattggatcagatgatttctaaggttactttgagctctaaaattttataattccattactgagagagtgcctgaacatagagatacccaatacatatttctaaagatttgttgcatgaatgatatcttatgctgcttctaaaacactatgatttttctaagatagtttccttttccccttcattaccaatgctttagaagacttaaatcttctgcataggcatttctggatttgcctacccacctaccaaccttccctcccctgaaaactttcagatgcttcttcattgttttagtcatttaccactttaatgaaattatctggcaactttattgtggtgggtggggatcartgacggtgtaatgaggcaattagcaaattctgatagttccatctactccatgtgaaagtctcttgatgttttatatggtactcttattaataatcccagagagcaggggttggcaaactatggcccatgggctaaaatggtttttacattttaaaagggttgaaaactttaaaactggaaggatacatgacagagactggatggcctacaatgcctaacatattatctagccctttacagaaaacaactgaccaatccttatgagaccagacttgcaaaaattacagtaacagagtgaaaaaccttcttgaagtgttaggaggaacttgagtcataatttgatgttgaatcagagagaacaactgtttgggcttatttgcctcagaggtaagaaaatcaagttttaactaagattaacccacagaagtagatattaatactaaggtttcgacctaataataactaacctgtattaattgtgtgcagtgtaccagacccatatgagatcctgcaccaacatttgctatgcactaactagtttaattgccattaccagggtcctcctggctctgctatttactagctgtttgaccttgggcaggtttcttaacctatgtctcattttcttcctcttcaaaatgagaacagaaatagtgcctacctcatggagttgttgtgaggattaaatgaattaatggaaagcatatagaatagcgcttagcacataataagctctcagtacttagaattaccattatcccagtttttcacatgaaggaattaattagagaaaatagttgctcattatcacaaaatagtgggacctggacttgaccattaatctgtgttatgcccagctgctagagatgggcaacaaattggattaaggctgctcagtagccaaataaaaaggaatgttgtaatgtggcaggtaacttctttgaccacatatctgcaaagacatcgcaccgagttccacgtatctgcaaagacatcgcactgagttccacgtatctgcaaagacatcacactgaattttgttttgctgccagtgtgcaattcagtagtgatcagtgcagttctcatgtcatttgcagtgggtctcaagtgaagctggaggtctctgttggtagttagtagccaggaaccaggtatgcttaatgccttgcattgcatagaacaattcctctttatcctgcccaagatgccagtgggcactgctatggtctgaatgtttgtttccctcttaaaatttatgtgttgaaacctagcccccaagatgatggtattaggaggtgaggtctttgggaggtgattatatcataagggcagaaccctcatgagtggtattagttcccttataaaagagaacccagagaggtgccttgccttccctaccatgtgaggacacagcaagaaggcacaatctgtgagaaagtaggccctcgccagacaccaccagtgctttgatcttggatttcccagcctccagaactgtgaaaaatgattttctgttgtaaattacctagtgtttggcattttgttatagtggcttgactggactaagacaggcccctttgtaaaacactgagagagggatggacttcataccctttaggggatccttctctgtagaattctttttttcagaagatttttttttttcttttattaataagctttttatttttgaatacttttttattggtacatagttgtacgtattatggggtacttgtggtattttgatacaagcatacaatgaatgcataatgattaaatctgggtaattaagatatcaaaacatctatcatttctttttgttggttacattccaaatcttctagctatttttaaacatacaataaattattaactatagccaccctattgtgctatcaaacaatagagcttattccatttaactgttatttttgtacccattaaccaacctctttttatccctctcctcctagtatttgcccagcctctggtaactatcattctattctctacctccatgagagcaactttcttagctcccacatgtgaatgagaacatgcaatatttgtctttctgtgcctggcttatttcagttaacatcgtgacctccagttccatccatgttgctgcaaatggtaagatttcattcttttttcatgactgaataatattccctcatgtttatagaccacattttctttatccattcatctgttgatggatacttaggttgagtctatatcgtggttattgtgaacagtgctgcaacaaacttgggaatgcagatgtctctttgacatactgatttcctttcaaattttgggcatatacgtagtagtgggattgctggatcatatagtagatctatttttagttttttgaggaatctccatactgttttctatactggcactaatttacattcccaccaaagggtgtgagcattcccctttctctgcattcctgccagtgtctgttattttttgtcttttagataacagccattttaacaaggatgagatggtatctcactgtggttttgattttcatttccctcattattagtgatattgagtattttttctaatacctgttgtctatttatatgtcttcttttgagaaatgtctatttagatcatttgcccatttctaaatcacattttttttttttactcttgaattgtttgagttctttatacattctggttaatcttttattggatagacagtttgcaaatatctcctcccattctgtaggttgtatctttactctgttgattgttcccactcctgtgcagaagctttttagctttatgtaatcatatttatctattcttgctgttgctgcctgtgcttttgaggtcttacccaaaaatctttgctcagaccagtgtcctgaagcatttccccaatgtttttcttctagcagttttatataatagtttcaggtcttaatttcatcaatttcgatttgttttttatacatagtgagaggtatggaatctagtttcattcttctgcatatggatatccagttttctcagcaccagttattgaagaggctgtccgttttctaatgtatgttcttggcaccattgtcaaaaatgacttggttgtaaacatgtgaatttatttctgggttctctattctgttctatcggtctatgtatgtgcctgttttcatgccagtaccatgttgttctggttcgtatggctttgtagtttttttttttttttttttttgagacggagtctcgctctgtcacccaggctggagtgcagtggcatgatcttggctcactgcaagctccacctcctgggttcatgccattcttctgcctcagcctcccaaatagctgggactacaggcgcctgccaccatacccagctaatttttgtatttttagtagagacagggtttcaccgtgttggccaagatggtctcgatctcctgaccacatgatccgcccgcctcggcctcccaaaatgctgggattacaggcatgagccaccgcgccctgcctgtagtatatttttaagtcaggtaatgtgatgccttcagcttttttttctcagggttgctttggctattaggagtcttttgtgatacatacgaattttagaatagttttttttttatttctgtgaagaattttattggtattttaatagggcttgcattgaatctgtagattgccatgggtactatagatatttaacagtattagctctttcaatccatcagcatgggaaatctttccatttatttttgtcttcttccatttctttcatcagtgttttatgttttcattatagagatccttcactttggttaaatttattcctgggtatttaattttttgtagctattgtaaataggattgttttcttgatttctttttcaaattgttagctattggtgtatagaaatgctactgatttttgtatgttgattttgtatcctgtaactgtactgaatttttcagttctaatagtttttggtggagtctttagatttttctaaatatgagatcatgttgcctgtgaacaaggatacatgttcttgcctgtgagaggaagaacaaggcttcttcctctccaatttggatgccgcttctttcttgcctaattgccctggctaggacttctagtactgtgttgaataaaagtggtgaaagtgggcatctttatcttcttccagatctttgaggaaatgttttcagttttcctcttattatggagacagagtcttgctctgtcacccaggctagagtctggtggtatgatcttgtctcactgcaacctctacctcctgggctcaagcaatcctcccatctcagccttctgagtagctgggactacagttgtgagccaccccaacacccagctaatttttgtattttttgtagagacaggattttgccacatatatgggatttattgttttaaagtatgttccttgtatacctagttttttgagagtttttattatgaagggatgttgaattttagtgaatactttattcagcacctgttgaaatgattttatggtttttcttgattctgttaatgtgatgtattgcgtttatagatttgtttatgttatccttgtatccttgggatgaatcttacttgatcatgtgagatctttcta

SEQ ID NO: 95839 - DNA, 54546 bp, Homo sapiens
  misc_feature (1)...(54546): n = A,T,C or G
gtaagtgaaagaagacagaggcaagagactacatattacatgactccattatatgaaatgtccagaaaaggcaaacttataaagacagaaagcatatcagaggttgccttgggactagctgggggtggcagttgggattgactgcacacagctttgaggaaagtttttgagtgatagaaatgttttaaaactggattctggtggtgatggcacaactttataaatttacttaaacaatgaattgtgggccaggtgtgatggctcatgcctgtaatcccagcactttgggaggccgaggcgggtggatcacctgagttcaggagttcgataccagcctggccaacagggtgaaaccccatctctactaaaaatacaaaaattggccaggcgtggtggcgggcacctgtaatcccagctactcgggaggctgaggcaggagagtcacttgaacccaggaggcagaggttacagtgagccaagatcatgccactgtactccagcctggcaacagagcgagactctgtctcaaaaaaaaaaaaaaaagaattgtggccgggcgcgatggctcaagcctgtaatcccagcactttggggggtcgaggcgagtggatcacctgagttcaggagttcaagaccagcctggacaacatggtgaaaccccatctctactaaaaatacaaaaattagctgagcgtggtggcacaagcctataatcccagctactcaggaggctgaggcaggagaatcacttgaacccaggaggcggaggttgcagtgagccaagatcctaccattgcactccactccagcctgggtaacagacaagactccaactgaaaaaaatacctgtacatttaccaaaaaaaaaaaaaaaaaaaagaagaagataaagagcctgcattgaaccacttttggaataatattttaagaacagtgaaatttggaatctagtaytgaaaaaatattggtataacaaaataatttgtaaagtctcttggctttacaaattataaccacatttgttctcactatagtatcatcctgatcgagcctatgtcaaaggacaagttgaaaacagtcatatgtttgaaaggcacaaaatgaaatgaaatgaaattgaattaccattatatatcttcaaacaaaaagaatgaaacagaggagggtgggcctcagtttggtttttatgttactaggctgctacctagtggtcatttataaaatggcaggacttgggtttttggtttttgtcttggatttgttgagccatgtctctacaccacagcaaatacctaaacacttaccgatgtgtgggttaaatatctgaatgcattgctgaataatttatgctttataaaaatactataggctgggcgcagtggctcaggcctgtaatcccagcactttgggaggccgaggcaggcrgatcacctgaggtctcaggagttcgagaccagcctggccaacatggcgaaaccccatctctactaaaaatacacaaaattgctgggcgtggtggtgggtgcctgtaatcccagctacttgggaggctgaggcaggagaattgcttaaacctgggaagtggaggttgcagtgagccgagatcacgccactgcactccagcctgggcgacagagcgagactccgtctcaaaaaaaaaaagaagaagaagaagaagaaaaaatactatagtggcaagaactggattgaaagttctgaaaaatggcctttagtccctgattggctgstgtcagctttgtgactttgagccaggtcaaaattaatccatggggactatccggttccaaagttttaggagcagctctgtaaggtaagttggccttggggccacctccttaactgctctaaactttagtatcttcatcttaaaaatggggataaaaaatcccatccctaggctagttgtgacaattaaatgtgacaatgcatataaaagtactatctcagaacacacctcaggaaaagttagaatatgactttccctctcagaatgtgcctaatagggaacaatcttttatctgccaattaaaattactccttcccatcctatcccaaagcaacaagcaaaaacaccagaagttcagaaaagtaaatatgattcttagaatgatctgctcatttgaaacataaatttgaacaatttaatttaaaaaataatcaataaagcatagccgctagaattttacaaatcacttgaaacttggaattgctgattattttaaaacaataaggtagtgaccgagatgtcaaaaggtgaatgttctagctcatcctctcaccactggtatcttatggaggtctgacatgtttaatgtatgccagccagcacaatgctgaccacagaaagtataattctttcattttcctaggaattaagctccacttttgtggggttggacttsttcctgggtgtgttggctcacacctgtaatttcagcactttgggaggctgaggcaggaagactgcttgggcctagtagtttgagaccagcctgggaaacacagcaagacctcctctctacaaaaaaaaaaaaaaaaaaaaaaaaaatcaaaaaattagttaggtgtggtggcacaaacctgtggtcccagctactccagaggctgaggtgggaggattgcttgagcttgaaaggttgaggctagagtgagctatgattacaccaccgtactccagtctgggtgacaaagcacgacactatctcaaaaaagaaaagaaaaataaataaaaataaaatgagtgtctgtgctaccccagaattatattttatttttgagacaggggctcactctgtcatccaggcagaagcacagtggttcaatcatggctcacagaagcctcgacctccttgggctcaggtgatcctcccaactcagcctcccaagtagctgggaccacaggcatgctccaccaagcctggataatttttttattttttgtatagatggagtttcaccatgttgcccaggctggtcccaaactcctggattcaagtgatccacccacctcagcctcccaaactgctgggattacaggcatgagccaccttgtctggcctaccctggattttattcactatttcacaggtcaaagaaccagtctgcttctgtaaccgaagggtttctactaccactttatttcttcacccattaggatatttccttaaggatgtcaacatatctagatgaccaattttagttattactttcaatgcagcagataggtattttggcattgcttagtttttaaaacagccttattaaggtataatttagatgtcatagaattcacctatttaaagtgtacaattcaaagagtctagtaaatttaatcaattgtgcacccattaccacaatccagttttagaacaattccaacatatactttgcatttgaccagctccatactgaacaaatttattggataattaacctgtgcattttaagccatctaaatctaggacccagcctagacattattttgaataaatcaagctttaaggaaaaacaaactctaaactttactcaaaatagagatccataaagcacattctcccaaggtctctccgggggtctgtaggctaattaacaatataaatttaaaatataaattaagaataaaaattaatacacatacaccaatacatgtgtatattttgaaaagtgtatgttgtataattcattattatttatttcaataggcataagtttttttttaagagacaaagtttcactctgtcaccaaggctagagtgcagtggcacaatcacagctcactgtagcctcgaacttgtgggctcaagccatcctcccacctcagcctcctgagtagctaggaccgcaggtgcccaccaccatactcaacgggcataaaaattaattttaaaaatgtttccagttatgaccatctttcgtccaatctcaaacttatttttttcaatcttgtaaatatgatgaggtggaataagttgtccagggacttaacattttgatctagtatatttttaatttatggaagaaatattcctcctgtctgtgatttggctgtgcacacttttgtgaggttggactggagataccgacttgggtacttgcagaggaggagcttcttccttaacgggatatttaagaggccccgattttgccttgtttcgaaaattattcaagaaataattaattaccatgcccctctttctgcaaatcctgtattcatggtatactacctccaatacagcatctattaaacatgtacaaatacatcatttgcaagaataacaatcttggaataatgaaaatgcttctacctatttgttgttcctgtcttatctctaagttcatctaagtttcggaagggtagttatgtataaaggaacttcactttggaaattccatttttctctagtcctagagagttactgctaactccattcattttgacatttaaatactattttatattgttatttaagtgttcaacatgtactagttcagtctcctcaaaatactgagtaagttccttgtgcttagaatagttgtttcaaactttgtgtgtgtgaatgaatgaattttacatttctcaagcacctagtccacaacgggcacaaaaaagctatttagtaagtactgtttaattaataaatgatacctcagrtttgtctcccttcctccggatccccataacatgtacatttatcacatcgcccagatttcctagacattacagattttctgttctacggcccccataagaacagtgcaggtgccacaccatatgtctgggacatatggtcctcaatagctgcaatatgaaactatttctattgcaataaatctaatatctattcctctctgtttactaatagttttgattacaacttcaaattttaaaaatcgaggatgaagttaaatagaagggaactgtccccttccttctatttaacctcgtcttcgatttttaaaattacaaaagcataatagtaaaaaaaagtttgacaatacaaaatgataaagtaaaattcgccttcaccaaaagtcatctatttccccttctgtggtttccacgttgcggctggtaactcggggcttccacgctgggcgagcctagagaatatccagtacacacaggaagcagcagcgcgggccaaatggcgctgagacctgcgcacctgtccacggaccgcccactcgccaactctgaccttgggtgagtctctcaaacttgagtctcggaatcttccacaaaatgctacccatctcaccaggtcgagtgaggagggtcgtgttatgtgtaagcactttgtgaaatctaaagcacgaggcaaacgtaaagcattgtagggggtcctagagaagtctttgtgcctgcctgagagccgtttcagttccccgcagcagcttccaaggacctcccaccatgcccgccgcttcggctcctgcactgcaaatctcgcggctcggcctgcagcggcggcttcccctggcctcccaccccagcgactgagcgcggagcccagcgcgcacgagcgccagcctggctcagagacacccacgaagccagggcctttcagcgcctgctaactggcgctacccctagggccgcctctcggttttaaacgtaaacaagagttgcccttccgtcttccaagacctgcaaatcgaagcttcttttcctccagaagccccgccaccttctaagcttctccccagcctcagccacgccccagcctgcaaaagccgggtcctttacgccccctggctccgtatttgatttcggcgcgcgccatacctgagggcagctgtgattggttggaggtgagcgaagttcctatatgattggctgatagcggctaggacgggtgaaggccaagggcggagaattatgggagggattaagactgcaagagctgagtgatggttggttcctgaacaaagagggcggagtaaaaggcggaagcagaattgggggcggggctttgtggaacttgggggamccagcgaaatggaagaagttaggtgtccagagcacggtaaggggctagggtctcagcgtcccggggcctgttgatttagcgtggcgtaatcgttgttcactttcttctctcttcagggactttctgctttcttaagaccggcgtccgcgatggcccgaataaaggaaagagcttctacgtgtgccgggcagacacktgcagcttcgtgcgggccaccgagtaggtctngagctgggccccactccctgtggctgcccggggcctccsgagaggagcttcccgctccccgctgtcgggcgtcacagggccgaggagtggtggggccctagtttgcggtgtcaggaccctttaagcaattggtgatcccagggcagcgtggcgtgttcggaagacgcccagctaattctggctgtgtgacccgaggctggttacccccctctctgggccgatggttcccctacctgtaaaattgaggatccggtgttttccagctctgggtttctattcacttgacaggccttaaccactcccttctcctgcccagacagtccctccccctttaaaggagtaaggacacacagcagacatagtggaaaataatttgtccctgttttgcactagttttaggcccgacggttttttttaaatgtttgagcttaaaacactctagtgattagttgttagscttcttatttttaagtaggattctctgcatctaaatggtgaaattgataattcaaaraaattagcgctggaagaaacaacggagggcctggcgcggtgtgtgacgcctgtaatcccagcactttgggaggcgaaggcgagcgaatcgcttgagcccaggggttcgaaaccagcctgggcaacatggtgaaatcccgtctctacgaaaaattaaaaaaaattgtctaggcatggtatcacacgcctgtagtcccagctactcgtgaggctgaggtgggaggagagagtcagaaatgttaagcatcttctctaaagtgaggaaagttaatagtttgtcaagtgttaatgttttcacagtaccaagtgtctacattttctatgtgaattttaaaactatcatcacatcattaaacatctcctgctctctattcagcaaaacttggtagagaaaagttatttttctccgtgtcagatgtagagtacataatggatatcagtattagaaaagtgccctttcaacatgtatactaacttcccatgtttctgtttcatgagttagatgatttacactgagcctctcagatatagtacccaggtcaagttttgtgagatagaagcatttttacctttgcaggaattcaacattaatggtggcataagatttggttttacattaagagaaacactcttatttaggatcccatctacacaaatgctttgctatacaaactagcacagtggtatttgaagacaattatttgataaacttgatttatttggactatatctgataaccaatatacaggccaaaaaaagtgccacaggtttaggagagtactttaaaccttcactcaaacctgtttactctcaaatgttatatatatttaaattttttcataataagttggaagggagtgattaaaaayttacacaaaacaagaagcatatagggcgtattgttagaggtaggcrtgtgaataacactaagtgacagctctcagcttgttagagggaaaggatgaagggaagagcctggggaaaattcatacagggcctcacagccagccctaattatgtcattcgtagggggatcccagtgtagagattacacagtgcagtgtggttttaaacttttgagtcatcaagaaacagttatgctttatttgagaaagtgggtaaagatgaaagctagggacttcttccccaaaggaatgcccatagctgtgataatgtgtgggaattacaaacccagtagaggttatacatagattcttggtgtaaaaacccatagttttgatttgactttargatattgatctctgttcctgacctaaaaatgttttcaacttttttcttttctctagcattcctgtttcccattgcttattgcatgaggactttgtggtagagcttcagggtttgcttctgccacaggacaagaaagaatacaggtaagggtccaaaaggaacatctaagtgtatttgcttttttttttttttctccctgaaagagttgtagccaggtatgtattaggattgttctttaaaagtcattttaaaaaacaaaatttgtatatgtattaagtgtcttttggctgtcactacctaaataccaagcagctagttaatctgagaagtctgatttctagtaattttcacgtaaatggctccacaatcatccctctccaactrtcaggtagcctataatgacagctgaccattggccactaacttgcccttaacttgtcaatcttctaattctggtaatagaacaaggtagtgagtaaaaatggctaaacrtatttagtcctcaataaatgttagtttcttttcctttatatgggaatttgggaagggcagagaagtctatagagctgggagatatttgtcacgagtattcaaagataaagtaggaattccctaagtgttagagagaggtcatatttaatggactaatatattgcattagagtactaaggcatgaattaacatggcattttcagggaaaatttgatttgttaatagtttaacatatctttaaacagagactttaggcgataaggctggccaggaaggtaggggtcaggatgtgatagatggtctttgtgtgatattctatgcacttcataatttatatattctagatccccccacccaattaaaggcatttgagtaccacctacaatttttatatacctgagtactgttcatacttctatttttcttaatttagttatatgtatagtaagatacacaagtcttaagatttcaaccagttgagttttgagaatgcatgtacctgctcataaaaccaagatccgagtcaaaatattaccccaataagtgccatcagtccccttcaagttaatttcacccctcccatctccacccctgtcagcaatcactgttctgatttttatctctttagatgtgttttgattgttcttgaacgttatataaatgaaatcctactgcatgtactcttctgtgtctgacttcttttacttaacagtatgtgaaatgtatataatatgtatcagtaattcattcatttttmttgtggagttgaatttcatttataaatgcaccactttgtttggtgtgcctatttgccatcagaaaatctcgacgttatctgtttaaatattttatccttttttttgcattgaaatttttatcaagtagttttagattcacatacagttgtaaggaataatacagagttatcccctgtagactttatccagtttcccccaatggtaacgtttgcaaggcttagaaatatatcacaaacaggatattaatattggtacaacccaccagttttattggtaaaggtagttttacttgaactaatttatgtgtgtgtgtatattctatacaattttatcctgtcgagtcatgtatctaccactacagtcaaggtactgaagagttccatcacaggatctctctgttgccctttctataaccatacccccttccctcccttctgccctcttcactccggcaatcaggaatttgcttttcatttctaaaattttgtcattgcacaattgttacataagtggaatcataaagtataactttggagatctttgcctgttttaaaatttttgtctttttttaaaactgagttggtagagttctttgtaaattctctatacaagttaggcyaggcatggtggctcatgcctgtaatcccagcactttgggaggctgaagtgggcagatcacttgagattaggagtttgagaccagcctggccaaccaacatggtgaaaccccatctctactaaataaaaaaaagcgaaaaaacaaaaaaaaaattagctgggcctggtggcacactcctgaagtctcagctactcgggaggctcatcatttttgtatggtttgtgctttttgtctgatctccaagaaatctttgcctaccccaatatcacaaatatttccaagaattgtctagaagctttatagttttatttttgtttgtttgtttgtttttgagagagagagtttcactctgtcttccaggctggagtgccgtggtacaatcttggctcactgcaaccaccatctcctgggttcaagcaattcttatgcctcagcctcccaagtagtcccaagtagctgggactacaggtgtgcaccaataatttttttgtattttagtagaaacggagtttcaccatgttgcccaggctggtcccgaactcctgagctcaggcaatctacacatcttggcctcccaaggtgctaggattacaggtgtgagctactgcacctggcctgttttttttttttcttcttctttttttttttagtagctttttcatataggtctattatctatatcttaaattacttttgtgtagtatatcaggtagggtagaggttcatttatttttgcatatgttaccaattgttttagcatcatgttttgaagattttccttttcccattgaaatgcttggcgtctttgtaaaaattcaattgatccaatatatgtaagtctatttctggggttgctaatctgttccattgatccatttgcctatctttacataattaatcagataaaatagtgtgagtcttctgactttattctttttcaagattgcgttggctgctctaggatctttgcatttccatataaaatgtagaatcagcttttaaaaatttccacagaaaaccctgttgggattgcattgaatctatatagatcaatttggagagaattgtcaatattgaggcttccaatccatgaatgtagtgcatttatttatgactttaaaaatgtcagctgggcgcggcaatcctagcactttgggaggccaaggcgggcggatcacgaggtcaggagatcgagaccatcatggctaacaaggtgaaaccccatctctactaaaaatactaaaaattagccgggcatggtggaaggcgcctgtagtcccagctactcaggaggctgaggcaggagaatggcgtgaacccggaggcagagcttacagtgagccgggatcgcgccaccgcactccagcttgggtgacagagcgagactctgtctcaaaaaaaaaatgtctctgagcattgtttaatacttttcattacagagttcctatgcatcttttgttaaatttatttctcagtgtttgtgttttttagtgctgttgtaaatggaattttttttaattttgtttttggattgttttctgctggtatagtagggctggtaagcctttattgcatgaagttattatattctactgatacttaaaaccatttacatactactggaggacctttaccatacagacatactgtggtagttgttaggaagccactgaaggatttttgacccaatttgcattaaaagaagaactatggaggacagattagaaagtgaaaatagggcaaagagaccactgaaataatagctaccattgaaagcccactatatacctttttttttttttttttttttttttttttgtagagacacggtctcactgtattacccagcctggtctcaatctcctgggctcaagcaatcctcctacctcagcctcccaaagtactgggattacaggtgtgggccactgcacccagcctgttcattatcttttaccttcatataatttgttgtgatagatttcaatatccgtgtttaccagaaagatggagaaactaccattgaaacaggtcagaaagggaatctgaggacccatggttatgaagtggcattgctgggatttaaacccaggtccaactgattccagacacaccaactttctcttaagtgagaggtgatgggcctgaattgaagtagcagcagtggaattgggtccaagtagaatgaaaacttgctgaaagagcactgatgagatgtatttcctggtagggcatataaacgtgttccttcctccattttttcatctggaatattgctcacatggccctaacttccctgggttggaggacttggagagagaacgtgtgtgatggcctcggtctggtgtttggcacattgtcagtgctcagtagggaaacggttgctaaggtggggcttctgggtaatgtgtttacgttaagcaggacaaggaagaaaggtaatgttggtcgagtattgggatgtgtggcaaacacatacagctttggactaatcatgtctttttttttttttttttttttttaaaagacagagtcttgctctgtcaaccaggctggagtacagtggcacaatctcagctcactgcgacctctgcctcccaggttcaggtgattctcgtgtctcagcctcccgagtagctgggattacaggtgtgtgtcacgacgcccagctaatttttgtatttttagtagacatgggcttttgccatgttggccaggctggtctcraactcctagcctcaagtggtctgcctgcctcagcctcccagagtactgggattacaggcatgagccacctcacctggccaaattgtgtcttattttcatgtgaaaccagctagaaaaatgagtgtgcagctctgaagaaaggcctgactgaggtcagaattttgagaacttgctgttaacgttctttgtactagatggataagactgagaagggtttattattttaaaatagaacaaaaaagtatgttacatgtatttctcttagcctaaattcagagcactattactaggaagtacttactggagctttaaaaagcttgtcttagggccaggcatggtggttcacacctgtaatctcagcattttgggaggccaaggccggcggatcacttgaggccaggagttcaagaccagcctggccatcatggtgaaactctctctactaaaaatacaaaaaatagccgggcatggtggcgtgtgcctgtaatcccagctactcagtaggcaggagaatcactttgagccggggaagcggaggttgcagtgagccaagatcacatcattacactccaacctggatgacagagcaagactcagtctcaaaaaaaaaaaaaaaaaaaaaaaagttgtcttaggacaaataaaagtaaaaggcagttcttaacacacaacacattaaaaaacaataacaacagaaaaccaggtactctgataggtagcatagactgggaatttaaacagaaatagataagtctatatatggatgatggcttccttagtgaacattaagggtgttcagccagaacccctggagagtgacctatgagagtacagcctttccctcacatactctgggttttctttttaataacttaaatattttacatcctctaattaatactattatgtttggctgaatgtagtcaggagacaggtgcaacagagtaatagaagggaggtgtaaactgaggcgaagatgcccatttttcatctcttgcagtgtagctgcatttgtgtgcagatctctaactgaaacaccagatggcaccactgaccagcatttgactrgccattcggccatggccctctgtgtacaggcagtaaagaaaactgataatctcagtagaaccagggggaagaaatcttgccttgacatgaacgatgtggtacaccctggtatacaaattttgggcattgtcactgagctcctgagttcatattttcctttctctctgtttctcacagaactttcactcaaggatacagggtcaaaataaatggaaatatttctttgcttagacgtgggtataacaagttttagttctttaaataattggttgtggtatccttctgagcaaactatcacaaggacagaaaaccaaacaccgcatgttcttactcataggtgggagcttaaccatgagaacacttggacatagggcgtggaacatcacatactggggcctgttgtggggttgggggagaggggagggatagcattaggagatatacttaatgtaaatgacgagttaatgggcgcaacacaccaacatggcacatgcatacatgtgtaacaaacctgcacattgtgcacatgtaccctagaacttaaagtgtaataaaaaaaaaaaaaagaaaaatattcacctccaaaaaaaaattaattggttgtggtagatgttcaaaatattttacttttaataacccttgaaacttcacatgtctagaaaactcctcgtgttgttggctattgggtgaaattgacctgcagattatctagccctagtatagtgagcaggatggtgatagagaggcaaccaggcatgcgccagacccagccagaacctcaggccccaccagctgtgaaggaccactgaataaagccatacttgtgaggcggtgtacagtaccatgcactgcactgtgcagtgcgagcaatccctttgtataaagtatagtaaccctttgtgatatgtgtggtagttacgttttcccagtttgctttttgtcttacaattttgcttatggtattttcatcatatggwagtgtaaacttttaaaaattactaaattctttatttctcagcttcagagttttatcccaggcttagaaaagccttcttcactttaggactacaagaatattcatatctgttttttttcctagaacatttacaattttgttttttacttttacatttttttccatcttgaaagttcgtgtaaaagaatgaggtagacattcggctttatgtttttccagagctggaccatgtaaagatgtgaactcataatccctaaggagcctttgacacagctggaataagagttagatgtactgagattggggtgcagtctcctctgcacattagagcgctaaattgaagacgttcagatgcgagatggttctgtgactctaagacatacagttcagggctaggaaggttacagagaaagtagaggagttgagacttgaagttgtccttgaatgaccttgacaattttgatggaggaaaggacaaggaagtgttgaggcagaacagcttcagcagaagtgtggatgtaggaataagcagagtgatcagccagtgtgagcttggcattgctgttgtcttttaagaccttggtatgtatcaggctttgctctgattgtattttgtcttcatcatgaccgtatgaggtatggactatatcattttgccattttacagaacaggaaactgccacagggggcagtcaattaaggtgtctgmtgtttcagaactaattaggtggtagggctggratttgaaccaagggagaatagttctggagcctgagagaactgtagccttgctaaagtgaatgcacttggcagtgtgatgttgagttggacattacctttaggaaaatgggaggatttgtgttttggtgaagaagtcaggattgaagaggtctggcttcttctagctggtcccttcatcgttattgcctataacctctgtcctggaaaacaattaataaacatactgcagaaattaatgcttttcttatagtggaattgatatttgctttctctgcgaaaatatatttccactgcattctttgttgatttacaatataataaaacgtaacaaacaaacttaytatcctaaaatcagaaaagctcatccagattgattttaattaaaaatgtaagggaaagcatttttagcactgtgcctagcacatagcagatgttcagtgtgtttctttccttagttctgcaaatcttgcccttctcctgaaagtctacatggcatgagttttaaagtagacactacagtcatgagtcatttaacaatgggggcatattctgagaaatgcgtcattaggagatttcatttttgtgtgaacgtcactgtgtgaacttacacaaacctacttggtatagcctaatacatacctaggttacagaactgtacagtgtgttactttactgaatactgcaggcatttgtaacacagtgctaagtatttgtatatctaaacaaagaaaatgtacagtaaaaatacagtattatctcatgggaccacagttgtatgtgccatccactgttgactgaaacatcatcatgcagcacgggactgtacttatgaaatattctttcagtaaagatttcaagtacttgatatgctttaaacaacagcaggagtttgttcttgatttatttctgtaagtagtagcacccactgatggcagctgttactttgaattttatgcattcaaagcatttcagaaattgtattacatatgtttaatataatatcctattgcaatgagaaaaattaaagaaaccagtaagattttaaaaattgtgaacttggatgggaaaattgtgtttgtacaagagggaggggctggacctattttctttttagcttaacttttatggacaacttgtccatttgggcttgttcatctttgtttatgtgtcctggtgaagtagtggcatcaagggaccaggacctgctcaggacccctgaattaggatgcagactgttgtgattcatgttgtacatcatgggactaatttaggaagttagaaaaagaacaataaattaaactgaaggaaagcagaaggaaggaattaatgttggtaaaaattgcatttaatgagttagaaagcagcatatagataactaataaagaaaatcagaggctaacctggtcaagaagaacagcacaaatacataacatgagaaataaggagctgcaccacagatgtattgaaatgtacatgaaatgacatatgcacagtttcactccttgtgccactgcttttaatagtaaaggataagaaacagctgaaccgcccaccaagagggttctggttaaaaataatgcaacatcccatacagtggaaaaccacaactggaaaaaaataataaaaacaaggatcttccttacatatatgttattatagaaaaattttcaaggtattaggtaaaaaaagaaaggcaaggtattcagcagtatgtatgttatgctacccatttgtgtagaggaggaagaaagaatgtatattgacttgaatatgcatttaaaaatctctggaaaggtaaacaaaaaactaatgagcagttacatgttgggagagaagtgaactgggcagatagggtatgagggggcttctcactgtgtttttaatacttattgattgaatactttacctatttcagcagacaaaatatatatttttaaagctcttatttaatcaattaaaagtttttgaggagttattttaggtaattacataaatcagttctattttatgcagcaatacttaattacgtacaacaggcaagtcatagttgggaataaagagatcatgtatggtttttgccctctagtagctgaaaatatacctggacagtcagctatattttatagctggacagtcagctttattaggttggtgtaaatgtaattgtgttttttgccattaaaagtaatggcacagaggcagttcatggattaaacagggaagggaatgtggggaaaccttgccaagcaggtacgacttaagatgggccttgagggaccagtaggacttccgtagctggagatgggggagatggtagacagattgggatgatgaggatatcctttggatggagagtagtacccatgcaaagtctagtagactggagggtgcatggcttagttcggcagtggaacagcttagacacctctggatagctggagtatgggctgtgtttgtgtgtgcaggaactttcttgcactgggatgttaaatctgtattcagccttctttttttggtggaagagtgtaaatatatacagaagtaagatagggtactgtagcatgagcttcaacaattgccagctcatggctactcttgttctatatgtatcctatccacttcaccccgtaactcctgccctattttgaaaaaaatcccagataacattatttcatctgtcaatattttagtatgtagctttaaaagatacggactttttttttttttttttttttgagacagagtctcactgtgtcgccaggctggagtgcagtggtgcaatctcggctcactgcaacctacgcctcccgggttcaagcgattctcctgcctcagcctcctgagtagctgggactacaggcatgtgccaccacgccgggctaatttttgtatttttagtagagacgggatttcaccatgttggccaggatggtctcgatctcttgatctcgtgatccgcccacctcagcctcccgaagtgctgggattacaggtgtgagccaccgcacccggccaagatatgaactattttttaaaaaatatttgtatgttttagagaagggagtcttgctgtgttgcccaggtttgagtgcagtggctattcacaggcacaatcttagcacattgcagcctctggcctcaaatgatcctcctgtctcaggcccctgagtagaggggactataggtgtgtgccactgcatccagctgcactcttttaacataccagttggtttacatattttcagtggactcataaatgtcatagtttttttttagtagttttaatttgtttaaatcaggatccaaataaggttcacaaattggaattgattaatatgtcttttaagtctctgaagttttcccttcatctttttttctccctcgtaacttatttgtggaagggatcaggttgtttgtcctatagcgtttcccactgccaagattttgaaggttatattctccacagtatagttttacgccttcttctgttgtttctatttcctataaattggtaattggatctagaggttagttttttgtttgttttggcttcgttgttttggggttttttttggggcaacattgctttgtagctagtgttgtgrccccccttcagggacacacagtgtctggctgtctctcatttctctgattttagtagccattgctgatcagtgtttctatttcagtcattcgttacagactaaaaagaataaacctgtgtgcattctctggctaccatgccatatttattcttggacttcctagcccttataaatgttctgtgcagtaaataatttttaaatgtgtatataaaagtaattggtttcaagtgacctcccaaagccaggttcaaatagttgcaagatgttttcttggattaaaaataagcttatctcttgttctaatggattttcatagccttgattatttgtgttttatacttcaytagattgttcttccgatgcattagaagtaaggcagaggggaaacgctggtgtggaagtattccatggcaggtaggaattattcatctgttttcaaacctgctgtgttaagacttttaatatgcagcatcacctgaaaataccttgaagttcacgtaaatgagttggtcttcatcagactgtctccgaaagatagttttctttaagcaaggtaggccctgttgggacttttattcaaaggatcatttagtcgtaatcaagattaattatttgcatcctatttcacttagtaaatattttttgaggtcttaaatgtagtcagtattcttttactcaaggaaaaaaatagatttccttgactaactcttgtrtctttttatagaggaatttctrcttgatactggtataagctaagtataagcataagctcctagtatgttagaactaggaggagcatctcctaataggagaagccctacagatattcagtacgtgaggaactagaagtagggaggtgataagacttgttttggcagaggtgtggcttgaacttacgattctagattaccacagtaaaatcctcctaaagccaaaatcaaagcaagtgttttaagacaatgtttaggtttggggaaaagttcatcttaagagaatagtttttttcctgaaaagtatacactgtggccattgtgattgtaaaagcactttggtttgtcactacttttccttgaggcctggaaaagagtgatcatggacagagaaggaaccaagcttcgaaagtatcgtgaagaaatgagtcctttgtgggtttggcacgtcatcttttctagacgtggaaatggtaccaagaatgttcaggaaatattggactgcttttactgtgtttccatttcttctgcagaataatcctaagtgaattaatgcaggaacagaaaaccaaatatcatatgttctcacgagcaggagctaaacattgagcacccataaacatgggaacaatagatactgtgaactactggagaggggaggagggcatgggttaagaaactatctattgggcactatgctcactgcctgagtgcaatatactcatataacaaagctgcatatgtaccccctgtatataaaataaaagttgagatgaaaaggaaaggcattctagatacgaagtttgtattaatattttatatgaagattaattattttgtctttaggatcctgattccaaagaacattctgtatccaataagtctcagcatgcatctgagacatttcatcattcttccaactggctgagaaatccattcaaggtacttgacaagaatcaagaaccagctctctggaaacagctcatcaaaggtgaaggtgaggaaaagaaggctgataagaagcaaagagaaaagggagatsagcttttcgatcaaaagraagaacagaagcctgaaatgatggagaaagacctctcatctggcctggtaccaaagaaaaaacaatctgtagttcaagagaagaagcaagaagagggagcagagattcagtgtgaggcagagactggaggcacacacaraagagacttttctgaaattaaatctcaacagtgccaaggtaatgagcttacaagaccatctgcatcttctcaggagaaatcaagtggtaagagtcaagatgtccaaagagaatcagaacctctgagagraaaggttacccagcttttgcctcaaaatgttcacagtcacaactcaataavcaagccccagaaagggggacccctcaacaaggagtacacgaabtgggaggctaaagaaacaaaggcaaaggatggccctagcatacaggccacccagaaaagcctgcctcaggggcatttccaagagcggccggagacccacagtgtgcctgctcctggaggaccagcggctcaggctgcaccagcagcaccagggctttccctgggtgagggccgtgaagctgccacaagcagtgacgacgaggaggaagatgatgttgtttttgtttcctctaagcctgggagccccctactctttgactcgactctggacttagagacgaaggaaaacctccaattccctgatcgaagtgtgcaaagaaaggtgtctcctgcctcaggtgtttccaagaaggtagaaccctcagacccagtagcccggcgtgtctaccttacaacacaaytgaaacaaaagaaggtaactattgactcgtgttttgtttctgaggtcagagcattgcttgttatgggcagatatgagatctcattgctacagaagggttaaatatgttcatgtgaaggttttataggtgcatgttcagtttctgccttttcccctatttatattttcaagattggtaagccagctgggttaaaatttaaaaaaggttctggtttttgcacacatatttaaaagaccataatttcagagtttgggygtttcaggctattttaatctgaaactattcatctaacagtgtgagargagagatccatttgatggaatctgtttttcagagcacactggcatcagtgaacatccaggctcttccagacaagggtcagaagttgatcaaacaaatccaggagctggaggaagtactcagtggtcttaccctttccccagagcaaggtaaagtggcttatgcctcagaactccgggtttgcatygactttacaagagacattcnggaagcccttttaataaagaatgtgttgattcattcacttttccattttattatctgcttctgagacttctttcacattacacctatggttcataaaaaactttctcctgtttcctgtggactctactttcttccccattgtttaagcaactgttaaaatgctaccttctctaggaatccttcatcggaatggtgatgatccctctctcttgacctcacctccacacatatrgtcccttcacttagtttgctgaactttaatctgctcttcccttgttttctgagcaggaactaatgagaagagtaacagtcaagtaccacagcagagtcacttcaccaaaactaccactggccctccccacctggtgcctccccaacccyttcctcgtcgtggtacccaacctgtgggttctctagaactaaagtctgcctgccaggtgactgctggaggatccagtcagtgctatcgaggtaagacccaagggcctgaccctgctgtgaatagccacccctgtgagttacgtgccacccggtacagtagtcacctcttatccacactttcagttaaccttagtcacctgtggttcaaaaaaaggtgagtacagtacagtaagatattttgagagagaaagagacagaaaccacattcacataacttttattacagtatattcttataattcttctattttattattattgttaaatgctttctgtccctaatgtattaaagtttaaaataggtatgtacgtatggggaaaaaaaaaagccaaaacatagtatgtgtagggttcagtaccatccagtttcaagcatccactgggggtcttgcaacatacgccctgtggataaggagggactaccgtagatgtctttgtgcccacatgaggggagaagccattcttaagtcagaagttgcccatataataaagattgtgcagctcagtagagctttgcatcrtgttacttagctttctgtgagggcacagactgtgtctaccttgttcaccactgtatgctgattagtcagctcagtggctggcacataggagtcatccagtcagcatttgtggatgaaaactctagctcgcatcattatgaggtaggcagacctgcagatatgctcttattctttcgtgtgtgtgtaagtgtgtgtaagactgaggagagacatgagtcaagactgatgactaatagatccacagagagcaataacaccctattagctaagtgtttccttcctgaactttctaggcaactttgaattcagaggtaactgcagaatgaagattccaagtggagcctgaaatgtgtaataggatcagttgacaggagactgatcaggagataggagcttggagattgggttggctggcagtgaccagaaaagcaaaagccacttgtttccsaactgagaactgctagagacatggaaagttgaggagagtagttaacaaggagggtaagaaacagatacagggccatttgtagctaagttcactctaaagggataaagaaaacatacttgtgacatcttttaggtaacacctatttgtatgcaggccatacaaaccaagatcacgttcatgcagtgtggaaaatcacragtgaagccatcggtcaactgcatcgctcacttgagtcatgtcctggtgagacggttgtggcagaagatcccgccgggctgaaggtgagccagggaagactcctggtgtagtcctctatgacagtgctccagcagccccatgaaactgctggcagagagactttctgagatacctttcctacagacagatgcttaaatggcttcccttgcagcatcctctccttttatgcttaacagtgcaaacaataacaacaaaaccccttttttaaaaagtcataaagttacttatttctgtagcagtaaaggatccatttgttgagttggtaggtgccacaagaatgtgaaggaattgttgcttgtaatgaactagttggggtgaaaatacatatacaatgtaaataaaacaattagcaaaggctttaaggcagaaataaggggtgccttgtaatatactataaagtacaaaagggattcagaataaaggaaacatcactctaggtcagtgattatttgttgtctgcctactttgtgccttaaaggttgaaagcctttagatagcagagaggaaaggaataaaacgctgcaattagagggagtggtgactagtgggaagataaagagattggtattcagaagtggtgatcagctgtcatcagtacctgagccagcagtagcaggtgatgttactgagtaggagcckggcattgatgaaggattagatctgaataactcaagagatagtatggamtcgctgtagcatttaagcagggatgactgatgaagattagtttttcttaacagagtacaagataaactggagtacagaagactagaagggggactctggtcaaagggctattgaaatttatgaccagtagtgcagactgggacattggctgcagaaaggagaggcaaatttaagagataatgaggaaataatgaaaagccaatgtaatggctgctgaaaatagggtcagaggtcttggttaaaagcagagagctgggcatagtggctcacacctataatcccagcactttcggaggccgaggcaggcagatsacttgaggccaggagctcaagactagcctggccaacatggtgaaaccccatctctactaaaaataagaaaattagctgggcatggtggcatacgcatgtaattccagctagtcgggaggctaaggcaggagaattgcttgaacctgggaggcggaggctgcagtgggctgagatcacgccactgcactctagcctgggcaacagagcgaggctgtctcaaaaaaataaaaataaaaaaataaaagctgtagagactgattttgactgattaagcagacaaatcaggactctcacttggggtgtaggggggactcttaatagaaatgctgaacattagatgcaacccaaaacaaacaggggcagaccaggacagtatggttacccttgagagagggtgctgttaaggacttcaaggtgaaatgaactgtctacagaatactgagggaatcatttgtagaaaataggagagtgtagagttcgtgtagccaggctcggcatagcctctcattaggaatttatgcttagcatttggttattacctttgtcaggtccctttgctactacaccagaagcaggcattggcttggttactatggcgagaaagtcagaagccacaaggaggaattctgggtaagtgtggtattrtaagagtcagcctttattgaatgcttaggcrttgtgctaaacacgtagtgttgtttcatttattcctctcaagaactctatgaggcaggtactattattcctcattttacagatgatgaaagtgaagcatggaagtgttaagcaacttgctcaagaatacacagtttaggatcaaagatgttggttgccagcagtagaagctgactctggctgattaaagagaggaggagtttattttttggtggctcccacaatctctaggagatacggagtgccaggctcgaggccaatttcaggagccatggctagagccaacacacaaacagcagtctattgcctccctcttttttttttttttttttgagatggagtttcgctcttgtcacccaggctggagtgctgtggtgcgatctcggctcactgcaacctccgcttcccaagttcaagtgattctcctgcctcaccctccccagtagctgggattacaggcagatgccaccacgcctggctaattttttgtatttttagtagagatggggtttcgccatgttggacaggctggtctctaactcctgacctcaggtgctccacctgccttggccttcccaaagtgctgggattacaggcatgagccactacacctggcctaaaagtagtctataaaaagcatcacagctactttgcttcaccaagtgctagaggcaaccagtgccaccccaaagtcagttgtttctatagccactstttcctgcagaaaggatttcatagggagtctctttctaaagctgcttatacctgaattaaagatgtttatgagtacatctgatatatagagccaggtcatattgccagtgccttagctgcaacagaaaccagaaagcaagttttccactctgctttggggacttgtcaggctaaaattttctaaggtgttcaattttcagaaaccatgatagatgtccactatggctagtaagtgactgtgtcagtggtcctcaaaaccacccccaggttcgatgatttgctagtaagacacagcatatggtcatactcacagctgtgatttattacagtgaaaggctatagatcaaaatcaacaaaaggaaaagtcacaggggcagaatccaggggaaaccaggtacaagcttccagtgtcctcccagtggagtcacatgggatatgcttaattctcccagcagggagttgtgacaacaggcgtcaaaggttccctaggaagctcattagagatttaatgcccaaggtttttattgggggctggttacttcagctggttacacaggtggcttcagcctggtatataccaagttttcctactcctagaaggaaagcaggtgttcaacataaaccatattgcttgtacaaaacaatttaggcagagtgagcaactcttaccttacatccgagtttccagaggcaaccttgtaagcaggcctttcaaaggatagcaggcaggcctatgggcctgctatgttaattatttttctggacagtagcagagccagaatttaaatcagagcccatgctctgacattccacttctgttatggcagaatgattattttgaatgggttatagtagcctcaatgttgcagtctgttaaaatgaggataaccgtattctgtagagtataaataataaattagataagctcagtgattggtacaatgacagtacccaagaaatgttcatttatgtcctcttttgatgaataagttaagggaatggaaggctattttaactccaggaatgttctggtactggtaaagtaagtagtaggatatatctactggacattttttgcttttggaggtaagggatcatcaaactgtaatagatatcagtcagcacattgtgcgggtaataacataacatagggactagaataatattcaaattgtaagttttaaattttacaagagtcatagtaaatgtcttggacctagatctcaaagtaaagagcaagtgctagggttctgctgaataasgaagataaaggagccattaaggtaggcacagagtagtgacggagtggcactgacagagaacaatggggaaatgtctgccagtggtttctcctcttgaactagggttgattatttgccctaagcaattaactctcttaattttgcttttattttctagcagatgatatgggcttaggaaaaaccctgacaatgattgcgctcatcctgacccagaagaatcaagagaaaaaggaagaaaaggagaaaagcacagctttgacgtggctctccaaagatggtagacagaagtgccttaatagcctgccattccctacgtcatttgagccacccaagaggggaacgtcttcagctaaaaaaggacacctttggtcatatttaattactctactggaaaaccagtattagattactcacctatcatatcatttctgatgctgagtatgctaattataagtgatcattttttccgtataaatttgcctataaactaggcagaattttatggagaaagctgaggctctagaacacttaatttaagcataataataattcttattttttgagacggtctcgctctgttgctcaggctggagtgcagtgcatgaacacagcttactgcagcctaaacctccttggctcaagcgatcctcccacctcagcctcccaagtagctgggaccacaagtttgcaccaccacacccagctaattttttaatttttttgtagagataggatctcaccatgttgcctggctggtctcaaacaactgggctcaagcaatcatcctgcctcagccttccaaagtgctgggattataggtgtgacccaccatgcctggccaataattattatttttggaaatattggggaaataactacagggtagattcaaattaatttttttaaaggaagatctgtcacaaattcacattttagtcactatagtggaagctattttccatgtttctgaaattctagaagttcctagattatagacactttctatcttaacatatgtttttaaaatgtagtaactttagccaggcacagtggtatgcacctgtagtcccaattgagggaggagaggcaggagaatcacytgagcctgggagcttgaggccaactgggcaagaaagcaagacactgtctcttaaaaaaaattaaataaaaagtaataactttataagtactttaaagattgaatatgttatgtatagacaacactacatgtaagttgccatgtattcaagtacagctctcagttgcttagatagattaaaaatctgtgggccgggcatggtggctcacgcctgtaatcccagcactttgggaggctgaggtgggcggataacaaggtcaggagaccgagaccatcctgactaatacggtgaaaccccgtctctactaaaaatacaaaaaattagccaagcatggtggcaggcgcctgtagtcccagctactcaggaggctgaggcaggagaatggcatgaacctgggaggcagagcttgcagtgagccgagatcgtgccactgcactccagcctgggtgacagagcgagactccgtctcaaaaaaaaaaaaaaaaaaaaaatctgtggcatctgctctcagggcctctaatgagcactgttgcagctgggtcctatatccctttgtgtgtactagcagyatgtgtaagtagcacaggcacacacacgcagagatgaggggccrtggtataaacaaaccatcactaattggttccaaaccaatgtttgcttattttttaaaaaaggtttctgtacttaattttaaggtagaagtacattaagttatgcttttcagaaagtataacaatactccatacgcctctataatgaatcaactcaagaggagttaggaaatgatccagctttcacttccagccactctgtgaaagcacattgctttttcacactgaggtcatgtgccacccactttcctccccctrtttagcctctctttctgcctgtacttttagtggagaaaataagtaatcaagtgtttcagtttaaaagaccatttcttccatttcctacttcactataggctctgtatagaaataagagcaatggttaaacatattaattgaaggagtaaagtcagtcaagaggaagaggtaatgcctttaagttaaaggccggtcaaacacgatgactcacacctgtaattccactgtgggaggctaaggcaggaggatcacttgagcctaggagtttgagacagcctgggtaacacagcaagaccgtgtctccatatattaaaaaagaaaagttaaaagccatttggtgaatgtaactaggcactgatttttttccctyctcaagactcttgtgactttacttcccatggaacactaatcatctgtcctgcctccctgatccatcattggaaaaatgaggtggagaaacgggtgaacagcaacaaactaagagtctatctctaccatgggccaaaccgsgattcacgtgccagagtgtaagtgcaggaatacgcagttgtgggggcgttcagcacctctgcccaagggcccacgggcctttgctcccatccctgagatttcacttaatcaggacgcgtatttgtgaaagccaaagacagatctttagtctcgtcaccatacagcctttgcsttgtatcctgaggtctactggtgatcttttgctgtgtccttgtcattgtcctcaatgaaagctgccctgtgaggaggcctgagatgccggagctgccattcaggtgrcagcagcattcccctagtcaaggagatgtgtcgcaaggccctcatggctgctggagttctgattccaggtgtacatagtgtgaatggaaccagcccagttctacagagcatcttgatagaatgctaatgattagttgctataggttgattatatttttatgactttttaatatatgaaccatctaagatgctttagactcaataatttaggacgattagagttaactataaattcttgaagagggatgctcaggaaggagggaagaaaatgcttccccacatggcaatcttagtcctagtctttgtcttttggttttaaaggaattgttttctgttcttaattgcggagtgaagatctagattgaatactggctgctgtagtcaaggatgagaacaaagttatttctgcctctaagtaatttctctcmccagcctccaatttggatattttatctcctaaagaacggggcggcagtctttcaggagtaagttgttagattggtgcccctctgtcttatgacaggccagttctcatgactgagagtcgcttctgcaggcaaaaggcatcagggtggcagtggcaggcctgcaggccttccctggcatagattactgtgagttgtctgcctttgtgctaaatttttatttagaaataaattgaatctcacttgatttgtactttgagcctaacttgtttggtatttagaatgtactagttgaccgattagaatcattctgaattatacttctttatatgatagtagggtaacttgtagacactgctgcctctctgaattaggcatatcatttttatcaaaagtatttattgaggttctcttggggctgggcatggtggctcatgcctataatccgagcactttgggaggccgaggcaggcagatcacttgagctcaggagttcgagaccagcctaggcaacatggtgaaacccatctctaccaaaaatacaaaaattagctgggtgtggtggtgtgcacttgtagtgccatttacttgggaggctgaggtgggagaatcgcttgagcctggaaggtggaggttgcagtgagccaagatcacacccctacactccagtctggatgaccagggtaggttactcacctattattatcatttctgatgctgagtatgctaattataagtgataatttttcccttttaatataaacttggcttgatctatgattagcagaattttactttatttcaataaatactttattttattttattattttatttacttttgagacaggatagagtgagaccctaccttgtctcaaaaaataaataaataaaataaagtatttattgaagttctcacaatattaagcttcactggaaaaagatttgtgtttctcattaataatctttatatgtaaggagtataagcaagatacactgaaagcttacagcatgtatttttatatcttaatgtcaaactagatcagtgaattttcacaaatccattatagagtggtgggaggaaagcaccattgatacaaggtgaacagtgttttgaagttatctttctcccctgggactttrgtgtcatccatctcaaatcattattaaatgttaattcccaactctatcctactttctgttatttcccaactctatcctactttctgttctggccagatcatattaagcattatattatcccagccagagaattttctttctgactcactggatggtaagagggaggctgtggtagctatagtgagcagacggtaaatgatcagaggtaagagatagggaaacccaagtgggtaaaatttacctccaaaatgtgtgtgtgtgtgtgtgtgtgtgcgtgtgtgtgttaaggacacaagttaatgagttctgctgtttgtccttccatttgtaggcatttttattgaaagatcaactctgcctctctcattgtccctctatagtgggaccatttattgatttmtttgttatgtctacgcagcctctctacatatgacatcgtgatcactacctatagcctcgtggccaaggagattccyacaaacaagcaagaggcagagatcccaggtgcaaacctcaatgtggaggtgaggctggggggcagccagggaagtggagttggagccacagatggtttaatgggagtctttctcagcctccacgatagcaagaggacctccctggaggtcaggaatgctgtaaatgatccgcatgtggaaaggaattgttctttcctctatcccatcacccttattccagacaaccacctcagtgataaagatcaacctatgccacaggattcagctgccttttagaatgaaagatgactgcattgtatttgtgggggtaataatcacctgaatatataaaagccttacttgttgctatttttattttagagtatttggggtatatactcatgatatttttaatatttattgtgcagactagtattttactactagtattttgattttaagccatctttccctgcctccctttacttcccagaaaaaaaaaaagggttgcaaataataaggccagaggctaagtgacaattgtgaatacgtgatggtcttctagggtgtccagggcagcctcagttatgtgatgtagaggctttatcatgtaattatactctgaaaatacagtattatcccaagaactcatttttctatatgttatccttttagcccaacgggatattcacaggtttctgtatttggagagatctctagaacatttctccagcttataaccaactctgacttatagatgatgaacttttcagattgctcactggttttccattgcttttgggataaaccctaaatttcttttcatgatgtattaggcttcatttatttatttatttgaggcagaatctcactctgtcgcccaggatggagtgcatggtgcgatcttggctcactgcaacctctgcatcccgggttcaagcgattctcctgcctcagcttcccaagtagctgggataacaggtgcccgccactatgctcggctaattttttgtatttttagtagagatggggtttcgccatgttggccaggctggtcttgaattcctgacctcaagtgatccacccgcctcggcctcccaaagtgctgggattataggcatgagccaccatgcctggccatattaggctctttatgatcttgccctacctgtatgtcgctcatctcttgatgacaccctgcccytccctggggcacctcttgctcagtcataccaagggatctgtagttcccaccatgctctgtcacagtgttgtgtctgttctccctccgaatgaaacgctttgcctccactccttctcccaggttaatttttttaaacctgcttcaagaatcttttctggaccactcccttcccaccttccccyggtttggttgaatgcctctgccagcaccttgtgcttacataagttatagcactttgtttcttcagcagacgytgagtatccactatgggtcaggtgctgtttcgtcaagagcagccagattcccacttcaggtattgaactagccagtgggacttactatatctatatcgtattgtaattatctttacacttgtttttctcccctgctagattttgagctcttgcaggtaggaactgttttttatatctggtttagcatctcacatctaaaagtagacttttggaaaattgttagtaaatttagtaaaatttagtaaatgttttattgagtgagtgaatttgcaggttcaatgcctggtgtagtcatggtctacagccattgcttaagtgtgtatttaaagaataaaagaaaactcggctgggcgcggtggctcatgcctgtaatcccagcactttggaaggccgaggcgggtggatcacgaggtcaggagatcgagaccatcctggctaacacgatgaaaccccgactctactaaaaatacaaaaaattagccgggtgtggtggcgggcgcctgtggtcccggctgctcgggaggctgaggcaggagaatggcgtgaagcccggaggcggagcttgcagtgagccgakatctcgccactgcactccagcctgggcgacggagcgagactcccatctcaaaaaaaaaaaggaaacccaaatttgaaaacattttactcttagacatcttatgttcaaagactgagactctcaaataacttatttgaaccagttgagacgttttactcttgggtttcttaattcttatttcagtgtacctgagctaagcaaatttaaaggtaaatgtgggtcctccatgcttgcctgctatttccccttgtgtccttaaggacatgtacattttcccatantgtggctggatttcacttgtgattcttccagggcacctcaacacctttgcttcgaatagcctgggctcgaatcataytggatgaagctcacaatgttaagaatccccgagtgcagacttccatagctgtgtgtaagctacaagcctgtgccygttgggctgtcactggaacccccattcaaaacaacttattggatatgtattcgctgctgaagtgagtaacttctcgtgattgtgtaaatatgaaccctgtctgtatcccttcatcattatttcatgtctcrtaataaagccttagtatgtgccagattatcttgtttaggagatggcaggcctgtcaacctttaaaggacaaaagaataaatatttatgagaaaatagctgttgattggttgatataggactttgattacattcagcccttatatatatatgcaaaaatataggactttatatatgcaaaatatatgcaaaatatatgcaaatatatgctatatatatatatatatgcaaaaattattcttaagtccagtgaatgttttcggctacttctgctttaaaacatatggtctagggctagcactacaatttatttgaagcaaacaaaaaagaatgttgattttaaaatatttccatttggctgagtgcagtgggtcatacctgtaatctccacactttggaaggctgatgtgggaggattgcttgaagccaggagttcaagattagccaggggagtaaaatgagaccccacctctacaaaaaattaaaaaattagccaggcacaggggtgtacacctgtggtcccagctgctcgagaggctgaggcaggaggatcgcttgagcccaggagttcaaggctgcagtgagctatgattatgccactgcactccagcctgggtgacagagcaagacctcagtctctaaagaaaaaaattaaaaataaaatacttatttttattcgagtcagccataagaggatgtgaaatttctttcttagctcctgtagctttaggaacaaattctagctgttggttatatgtcttgttgtgacagcgtaggcatcgttaataggaaaactcacatttttataatgtggttttgttattgacttacatccttttgatctgtccagcaaaggtttgctatgaaattcacttttaaaagtgattggatgacaggtgtaacagaaaatctgatttgtcatcttatatcttactttgaacctttattccattctccctgacttttccttccctactctgtgcccttcttcctcaacaaaaaaggtttctccgttgctctccatttgatgagttcaatctgtggaggagtcaggttgacaatggctcaaagaaaggaggagaacggttaagtattttaaccaagagccttttgctgaggagaacaaaagaccagctggactctactggcagacctttggtaatcaagtttgtacctgtccctgggggaggccagggaaggaacatgactgtgtccttgtcttgggttgaacagccatctgctttgcttcaggagcctctgagtttcccatcctcctgtgaggaggccccagggttgcagttccatgcctagtgtcatagcaatccagttgtactgtatgttggagcagtcctgtgtctaagaaagggtggaagctgcattccagggttgactagatatgcagtgtcagtatggggaatttgttctataataggcagttaatttgtatagcttcatgccagcttttttttttattcttccaggtgatactgccccagcgtaaatttcagttgcaccatttaaagctttctgaagatgaagagactgtttacaatgtgttttttgcaagatcaaggtgtgtgtattaaagaagcaccttctcacacacattgttttattcctgtcttttcttgggagtgagttgaaggtcaaatttccacaaactttatggcattattgattagttggatgtctgyattccctttttttttttaccccatttttctccttctcccctccccagcttacctctgtctcatacacacatggaaggcaaaattttgaacctactcttcattggcttccytgcatagaagtcatagggtgtggtcaccrtatactgaatctgtctggtcctcatggggctgtactgaataataatatctctttgacatttgacctgtcatccagcatctcaccggaactttaagaagaygactttgtaatcctttgtgtcatctgttctttgcactttctcttgaactcttatctttccctgaattccagatttactgtttcctatttggtacctctcatttacatttctaatgtaaatatattttttcttcttttacaccttatatttgttagcttattttaaaaaaagattggttttttaaaataactgtttcttttgcattacctttggccattgcttcttatgagcttggcatcatttaacaagtcttctataatttgtcaagatcccactgcaggcacagttaagcaggtcttagtgaccattatayatgcattttttttctttttaatctgaggcaggtcagctctgcaatcctatctaaaaagacatgaaagtagaggcaaccaatctggaagaagccctaataatccattcagtagaggtaagctgtaggactctcataaatacatatgactggtgaaaatggggatttggattcagtaaaacacagaaatgtgaggttatgaatccttggtatcagagatttggcgttaactaagaccctcaaaccagagtaaaatctactgattgcaaacacgagatctggtgtttatttagcttctttttaattgtttcctaaatctgctttattaaaatgcaggtagttctataaggaaaaaccgatatttcatttggcctaattgaagtggcctatagaagtgagttgtaactatattattgagtctgagatcaaacatggttaaagtagccccatgtagttcctggctctctccgtatttctcttttaaatcctgtaccatcctgtggcttgtcttccctcttggaagtggcactggagtttgggtctgaggagcctagacactcggaggcagcagactcaccgagatccagcaccrtccacatactgtcccagttgctgagactccgccagtgttgctgtcatctttctttactgaagtcggtaagaaaagccctcagcctgctgtcatatagtgctccagaggggccacctgagaagtcaatttcactctcctccaactggaatccagtctgcttgatcaaaggaaatgctgtttcggtttttctatttttgttttttggtgggttggagaaaagggggcttatttattttgctttatttcatattaatcttgataattcctatggcatcaagaatagtgtatttctattgtttattttgttttagattaactgtttaagaaaagaaaatgatattttgtttaaaaagaagccatttgtgaatgctctggtacttcagaatgtcataaagctaatttagttcttggggttttctgctttcaggcagttttggggttttgggttccagttataaaaactcagatagttatacagactgaaaagttgcccctaccttggatagaggcacatccaaaattaagaggagtattctattcatttaaggagctgtaataatgtattctgattatcaacatctcaattatattctagcttggaaaaaatagaatgattatgtcatctgcctggcaagtctttaaaaagttccatcatttggtttatctttaatgtggtgaaaaaacttgcaagatcacactttaatcaaggtgtcttgaggagttactgatgacaaattacaagatattttgctctgtgaagtggtaaacaatcaaaacatcatcaacaagtaacaaggtttgctcccttgactcccagctgctcctgtccttttttgtctgttcaggccctggatccaatggaactgaagggtgaaggtcttgtcctttccctrgaagaacagctcagtgctttgaccttgtcagaactccgtgactcagagccatcttccactgtttcccttaacggcaccttcttcaagatggagctttttgaaggcatgcgagagagcaccaaggtactttttgtctcctctgtagtagtcgagagacttcgattcctcacacattttcctgtgtgacagcacttcatttgtccaagtgggaacagccatttgccagcagagctagagccgttaaattctagctgatcagattctccctccagtcttaaagcttcatttatttcacagataacactaaagccttactacataggggactttgagagagtaatttgggacaaccccagcattgcactgaagtgggttttctgtcatgggtcactggggagcttgccaggtttgtgctagggacggggcctatgcaagtgagcaatttgtttagagaaagcttaaaaggaaaacaaaggcttgactctagagactgtgtcatacatgcgagcgccaattgctctgactttgaaaggcttccacatgtgagtagtgtttcctacatagccttctgtcttcattagtcattctgctctgttttcgtcagagctttttaaggcagaaacattctgctggaggaaggcttagatatgccgtaacctgaatcctgcctgtctgctggctcggaatgtgcttcatcatcctgcctgtcttgaaagtgaggcttgtttctctcttagcatctcaagctgccgttcttgggctcaacctctcttcaaaggctttttttgaaaaagtgtattaataactagaaaggtcacttccaggggaatggcattattttttaaaaggaatgctgccttttaattaaaatttgaaaacatttacctaggtctttaccactgatagctgagagaaacataagaagagcatcccatgtggccagaacacacatgctagtgccttcagagtgagctattgggctaaaatttaaattcctaatcatttgtgttccttgtttaattaaatgcaggtaatatttattcacaagttttcttaacatatgtccattaatagttcaaaccacatacggttrtttcaagtagggaaggaggcttcttactggaatttgaccccggctcgtgggccataaatccagccctcctgctgcagttttctcaaaacaccatggctagctttttcatgtgggagtcacagcgccttccacaatctcaagttgccaagacaccaggcacatcagtgtctctgttctattgttaactaaataacagatgtasctgcttttctgtctgctaatttgaatggtacagttctgtgactcacttcctgcctaggcaccagaatgtttgttaagattggaaagcagccccatgtggtgaccactgtaatgacatcctagaatgtgggagctcagggcacctcagaatttatctggcctaagtccttcttttcactgatgaggaatctgagtcccaaagtggtccagccatatgaggacagaggaagaacttctgtatatttgtctcctgattgacttacagcccagttttcttccttctccagcattctgggggtgaactctggggcccttagaggctcttgaaaggtttttcacatgagcagctgggaagaatgagcccagctgcactccaaagtcatgccccacgtgttcttactgacagctcccctgtggactcaagtgcaccctaagggttcttggggaatacccagggagcctgttcggaagctttaacaatggttcctccgtctggacaggtccttttcaacaacatttggagcaggccataaagtgggtaaagctctttcactttcttcttcagcaaacattaggagagtatcttctctgttttggccatgtgtgtactcacagcccctcacacatggccgaaacagagaagttactttcctaatatttgcctccttggagtgtctcaagtcctggaagcaagagataataagcaattaatatacagtatgacaaggaccgtgataatagaaacaaaaggtgctatgatagtacttgggcagtgggcacctaacctgtactttgggggttgggaggacctccaagaagaagtgacattaagctgacacaaaagggtgttctaggcagagggagcagaatggacaagatggccagtgtgtgatttatgggaagaattttggtgtgcttgctgtgtcgtttgaggagggcrtggtgagaaacgaacccagagaagcagaggctggagcagcaagaatccggcaagctgccttgaggagcttggcctttatcctcagtgggaagctatggaagggctttagccagaggggtgaagtgacaaactcacattttagaaagagctttctggctgcagagaggagggtggaataaagacaggtgaggccagagcacagacgccatgtaggaggctgcttcgcatggcaggtgaggggagatggagaaaagtgaattgcttaaacatacaatgttgatgtaaccttttcccagatttcatctctgttggcagaattggaggcaattcaragaaattcagcatcccaaaagaggtaactgcgttttctcattatccaagtattggtcataattatgtgagaaaatttgatattgccaagagttataaatcaaggactgtgagtcatgctcagcagaaagcactgaggttatagcacacattccctgtgatttctaattaaaatatttgtggtacaaattgaaaaggagatccctagaggatcagggtaagcgaagcatctgaaaaagtgtttaaaagtagagaagcatataaagaaaagcaagcgagtgaggaggctccagcagtgctgataaygttcttaagctgagtacttggatacaaggactcatttgttatacctgacatatgtgctatacacctgcattatttataaaataattcaatataaaaatttagaactcgaattaagacagcgtgggggcagggaggagcctgttgttctggctggcacaagaagggtggtcagtgtgtcccttttgtgcaggaccacagatttctggatgagcactaggaccccaaatgaaagaaggctggagtcatcactttactctagctaccatttttttctgacttcatttagcactaaataaattgtagaaaggacctagaaataactggaagcattataatcttcagatatgacctaaatgtgtgccttctcccttaggtagcagaaggcctttccttgtcaacatttgatagctaaccttaagaatgatnagggcattaaagccctgcagatgagtctgtttaatctatgttagggtatttttttattttattcttctttccagtgtcattgtctctcagtggaccaacatgctgaaagttgtagcattgcacctgaagaagcatggactgacttatgccaccatcgatggctctgtcaatcccaagcagagaatggacttggtagaggcatttaaccactccagaggccctcaggtacaagctggtcacatcagagccgcataattaactgttctgagttatacraagagaattctttttgtttggttggtttttgtttttgtctttttgagacggagttttgctcttgttgcccaggctggactgcaatagtgctatcttggctcaccgcaacctccgcctcccgggttcaagcgattctcctgcctcagcctttcaagtagctgggattacaggctcctgccaccaagcttggctaatttttgtattttcagtagagatgaggtttcaccatgttggccaggctggtcttgaactcctgacctcaggtgatccacctgccttggcctcccaaagtgctggggttacaggcgtaagccaccgtgcccagccatataaagagaattctgatatggcaacttaaaaatatttacagccttgattcctccgagtgtttagaatttattagacatgtattgggatacttttaaagagcacaaatattctaaaaagaatcaaatatgaggactaaaaggagattaacagcagagctggttaggttgaggggaatctttgcagaggaggcaagctttgaaggataggtggggttttggtatgaggaaatatggaaggaaatgaaagaacacaggcatctaattatagataataaagatttggaaagcattagtagaatgataggcaggagaattattgtagcaatggaggggtagggactgatgaaataaacataatctggttaattgaaagtttattgagctgaccatccccagggttctaaattacagtatttatatattttggcaagcactcagttaattttttgaggttgactcacacacacacaaaatgtgatgtgagaattttctcaaaagtgagacatgggagatagcattataatgttaaaaaaaaaaacaatttataacagcagaaggaaatttgataggaacacagtgcttatctgtattgattgtggacttaaacctgagaccgagatgtgttacgagaccaagtctgtttaaagttaatgttgtgtttccttttgaaggtaatgctaatctctctcttggcyggaggtgttggtctaaacctgactggaggaaatcacctctttcttttggacatgcactggtaatgattccggatttgtcctgggttgtcacagcacatcaaggaggccagtgggctacaggggcagcaagaactgacttcttatgttgattgctgtgttcgtattgcagagatgccttgctttgtatgtgtctatagatacagatctaagcagggtatagggctrgctgactcccctgaattcctgagctagcaagccttcaaatgactactcaaaatagttcattcacgttattgttagtctaacatctgtttccatggaaacggggagcatagcttttcctcatggctaagagttaaccttgctcagttttacctcttctccagaatactgtattccagacacacttgttggggtccaaggaaatttcaacctttgaaaagagggagaagcattactccaaaaagaaaaggaatagggattttctaattatgttagaaatacacttaatacctcacccttggattcattgtatgtagtgttaataccaggagtacaaccacatctttcgtggctacagaatgaatgagttagtgtgttgctaacagaaaatctcataatgagtaccagtttctggttttccagttatgccaatcaaggattgctgctggggattgtcattggtccaattctccagacagcccagatgggtacaaataggtcaacctgttatcatcttccaggagaacgggtttagttcttacttgggactcctctgtacacgtgagtgaggaaagcatactaggaatcatgcttttttttttttttcagagatagagaaatgttatccaagattttaaagaggtaagatgagaaactaatttggagttacaatgggaatcaataaagaaggaaacaaattaagtctccttaatcgaatcacagaatattcaagttgaaaaaggcagctagtcaagatcattagctggcccttcaatttccaagtagcaatctgaagcctagaggactgaggttaaataacttgcccaaggacatctagctacctagagaccagacctgagttttggtttcacctctgttacttaagagttgtcaactgatgatagtgctaagagctattattaacagtctgaccctagtttctcactagaaactaggcaagaaggtatctggcaccagcttgtcttaggccagtatagcttaggacagggatcgacagattttttttctttgaggcttttcaggccacatagttctctgtcacatgatgtgtgtgttttgttttgctttgctttcttttcttaaatccctttaaaactgtaacaataatttttagctacaaaaacaagctgtgggctggatttggcccatggcccatagtttgccatttctgatctagtatgtcagttcctttgagctttagctgtcttctaacaggaatccatcacttgaagatcaagcttgtgaccgaatttaccgagtagggcagcagaaagatgttgtcatacacaggtaagtaatggtccccaggacccaggacccttctcaacttgtactttgtgaaagtctttctttcttaggtagtgttttcatagaatttaaagtatttggtgatgactttactgatgatgcccctgaggcataccttcangcaaaccacagtcaggagaaaaacgagcaatttggggtaagcttgaagttggtcactgcaaaagaagagcaaatttgtgtatatggtgagggcagtccatgaaaggatgctcctatcttttatttttctttttaacttttattttgacataatttcagacatacagaaaacgtacaagaatagtaccaaaaagttcccatatattatggtgtgcatgtgggtagaaacatttttctggaccacttgagaacaagttgtagacctgatgctcctttgtccctaagtacttaagtgtacatttcttaaaattaagggaattctcttacgtaaccccaataaaatcatcaaaatcaggttattaaaattaataaaacactattatctgatctacagatcttttcaatctcacttgtctcagtgatgtccttcacagcaaaaaagaatcccagatcctggtagcacgcagttttcataagtttgtctcctttgatctggaacagtacccagtctttgtgttttatgacattgacattttgatgagcatgagccagttattttgcaaaatgtcctctgttttggacccccttgtctttaaaaacaacaaaacctgccttaatgctgccaatcccctctcacaatggccctcttttttgccttccttttcatgaccaggtttcctgaagaattaggaatcactgcctatctttacttgattacttcccattcattcctcagcctttacaaactggcttttactcctgttgctgcactgaaattgctcttgttaaggggcaccaatgacttccagactttgctaaatatagtgattatgatagtcttcctatgctctcttctctgctcattctgtacattccttccttcacaaattctgtgcactccagtaagtccaaaatttgtatctttagttccaaggtctcctaaacttcagacctatcgcagtccctgctaaatatctgaatccgagtgtccacatactcatctgttattccttcttttattcattgttcttttgagcattcagcccataaaacataccttttgagcacccactatgtagcaagtataattacatgtttcaggtactcaaatgttacaaatagaaattgattttctcttcctattatctcaaatctgctattcttctgtagtcattgtcyttgtgaatagtatcactctttatctaattatctagccagaactagactcctacctttctcgcttttccacttaccaagtcctttagttatattttctaaatgtttctgataaccatttcttccttcccatgcccactgccaggtccccscttcccactctgctgaatcctgttctctccatcaccaccgaagggctcttcctagctaatccatctgattgtgtcatccacttctcatattcttcagtagctctcacctcctataggatcaaatcaaaatgtcttagcatgacatgcaccaccacccgtgatctggccctaccagcctcttgagcttttgccattgtggacaacatggtcaatgtgaacttcctccaatacaccatgctctgaaactcagccatggttttgcacgtgttcccattccctggggtgctctcctcactgctctttctggcaaacccttgcccaacatacaagtctcatattaagagttaactgtttaatggggccctccctgactaccctggacacatttccttctcctccttttgcacacggcacatacttccattatagcacttaccaggtcatattattgtttattttcatgtttgtctcgcttttgttctgcttyggagcaagactatattcatctctccatccccacacctagcatagtgtagtgagtgcttaatcaatacttttgaatgagtgaatgaatgacaacagtgccatttacttggtttgaaaaccctgtttttattgtgaattcactaagaaatactctacttaaactagcagaaatttgataacctttgaggccttatggacttaccaaggtagaactttttgggtaaaagctggatctctatacttttttggattgggatatcttttgcttattttgagtttgtttcaattaccttagcttcagaaagtattaaaatgccaatgtgggtcacatccttttaaagggatatatatctagtcaaggttgtttggattcctcagacagggttcttaactggacctaagaagacttaaaggaagaaatctcattaaaaatgaaagcataataaaagtttgaatatattattagatgtgctgcttagggtttttgatagtttgcttattttttgtttttgttttttagatttgtttgtgagggaacagtagaagaaaagatcttacagctccaagaaaaaaagaaagatttggccaaacaagttctatcagggtctggagaatctgtcaccaagctcaccttggctsacctcagagtcctttttggcatctaacctcctgtggataagggctcagaatagcaccattgctggtttgtattaggatctgggaataacaacctaaccatgagccttgaactctgttctttgcatttcaatttcaccgtcaagcctttcaccttcctcaaaatgaggcataatcttatccccagaattgaggaggggttgtgttaaccaattakttaaccaattatgttaataatttatttaatgagtggtatggaaaccaattgatttttttagataaaagaatatgttttagagttggatgattttggaaaacaactctggcagaattgtatataagcttcagtaaagttcaaaaagcgggccaggtgtggtggctcatgcctgtaatcccgacactttgggaggccaaggcaggaggatggcttgaagccagtagttcaagaccagcctgggcaacatagtaagaccccatctctatgaagaataaaaaaatgagctaggcgtggtagtgcacacctgtagtcctagctacttgggaggctgaggcaggaggatcccttgagtccaggaggttgaggctgcagtgagctgtgattgtgccactgttttccagcctgggcaatacagtgagaccctgtctcaaaaaaaggaaaaaaaagctcaaaaagttctgtgttgcctttctcttcttagctgatgatgggagaaccagttactaccttctctaacacaggctccatcctatctcttcatctcttcttgccagtgatgttgcacctgtaaccatctttttatgggtggagcagagagtcaatccctgcagccaccctgcagccagccatctctgcagttctctcagtgcaggcagttcttcctctcaggctgaagatcaaggagatgctttgtacatgaacagatgctgagtatctgttatcattgtattgtttagtgtcagtgtatcatttagtatttgtatcactgtaccatttagtgttgtatatcactcagtcatttaatattggttatcaccatacagtttaatatttgtatcatttggttcattgtatcgtttagtatttctattataacatttctatttgtagtatttgtataatatttgtgtcatttttaatagtatttgtatttttacaaatttgcagtatttgtagcatttagtatcattgtttcatttagtatttggtacaatctaataaatactaatccagtccaatactaatccaatccaatactaataatactattggtacaatccaatactaataatactattggtacaatccaatactaataatactaacagtagtattgatacaatctaataaataatgtgtttgacagtgtagcagaaataatgctatgtgttcaccaaacccacttccttttcctcccgggcacccagagagactgtatttcccagtttttgctgcagtttgacggggtccatatcaatggactgtggagagaagcgattgatgtaagtcacttctaggtggccctctaccactttccaaaagatcattcatgctgtttcttccctcctcagcctatgggatgcaaaggaactgatggaagattacaaggccctagggaaggtgaagccactagctcagcagttcttagcctagtttttggccatcagcccttctattagactagtgaagcctcagtcccaggatggctccccatgtacacttccctcctcgccccagctcacctacactggactatgacatgatcaaggaatctttttttttaagctactgagatttctgtgttgtttacatagcagtttgtaccctaaacaaacacttgagattttatacttcaggaaactattcagatttccttctcattagcaattgttccaaaaacacttactctgctaatttctgctagaaagaatcacagttcttctaacacagaaacatttctgtcccttgagttgggaaacaagaccctatgttaacccagtcagagtgtggactgaggcattcggagcctatttaagcagaagttttctataaggacaagatttaaaggcttacaaaggtaaagacaatggcctggtgggaagaattctagtctagaacgtttgagatttgactctagttctaggttcatcttagctgggtgtgtaacgttgaaaaaattggccgggtgcagtggctcaggcctgtcatcccagcactttgggaggccgaggcagacggatcacgaggtcaagagatcaagaccatcttggccaacatggtgaaaccccgtctctactaaaaatacaaaaattagctgagcgtggtggcgtgcgcctgtagtcccagctactggggaggataaggcaggagaatcgcttgaacctgggaggtggaggttgcagtgagctgagatcgcgccattgcactccagcctggtgacagagcgagactccgtctcaaaaaaaaaaaaaaaaaaaaagagagagaaaaaaatccttactttctctacactctgatttcctcatttgtaaggtgggcagttttcagaacttagcagcaataaggtttctgataaaatcaagaagcaaaggaagtaacattgcctttttgaagttttgctataagattgacataccaaggtaaagattgagtcacctgagaagcagtggctcccaggccagcaagaatgtacaaacctggctctgccatttgctgattgatattaggcaagttgcagattccttggacatctcaatcctttcatctgtaaaatgtgtggattagcatgtatctcatgctccactgggaatttcatagcaaatatatatactacaacatggttgaccagatagatcagtaatgtcaactagaaggtattagatgaacattgtcagtctccaatcaagcattgtttaggggagaggaattctttcaggttcaagcattctggcttttagtttggagagggatgcagggattgtaacttaaaatcttcagatattgaggccattgacaagtaatctactgtaaggtagatgcctcctggtattttaaaacagcttttctaatttctcatgttattgtacataagcaaagcaacctagttatgtcttgggtaggtgttcttatagccgtgagatgctactgacttgaggtggatgcagaaaaaaatggaaccactgccttaatgggatggaatatactaaacatgcattcttaaatcctagtgctgggatggattacatgaattacattgtggagctgcatatgtgtctcccctcttccctccctgggggttaggctgggtttgtttggttttttttgttttgtcctcatgaggcttagcatctaagggagacaggcatgaattaacagaagtggcattctggtatctgtctcagcctcatattcattttagtgtaaatcagtttcgtcaagtctaggtatgacaaggtgggtctttgcaccttctagcgatgggcagcatcccacaacatagtggtctaattgaggtgctgcactatgagtcctgcctgtgttaaccagccttccttcatgtcacaatactgctgctggatttgctttttacatctgcctattgcacctgacttgggcatggatgatatgaggtaataaatgctttgaaaaccatgaagggccacacaagtgctagtgttattgctgtgggacaaggtctgggaatatgagaaccagcagcagcatgggtgcagctgagaaccagatggtgaacatctgtctccaaagtgcaacattcctgagcaccggatttataaggcatttcttactcgacagaattgacttcatggaaggtatgtagtttgactttgccttagccatgttgatcaaataggagtattgtgcatgccgcagctagacagagtcctgggccctttaaaaaccttgtcagtgactcccattgcaggcccagcgcagtggttcacacctgtaatcccagcatttgggaggctgaggcaggcagatcacttgaggccaagagttcgagaccagactggccaacatggcaaaacctcctctctactaaaaatacaaaagttagccaggcgtgatgttgggtgcctgtaattgcagctactcgggaggctgaggcaggagaatcacttgaatccaggaggcggaggttacagtgagctgagatcataccactgcactccagcctgggccacagagaaagaacggtgattctttctagcagaaattagcagagtaagtgtttttggaacaattgctaatgaaaagaaggaaaaacagaaaaaaaaaattttctgtttatgggaggtgacttatttctctatcaatcctgtgagtgatttagcatggcaattcatgaacactgagttgtttccttgctctgattgtctgttgctcaatgaaatggcttttagcagggctcaaaggtgaagccagattctcctgcactaataggataagcatggagacaccagtgttcagtgtggcctctggttgtctgaaattttgctgtcaactctaataccttgaaagaattaggtttccaaagtgggatattgtgctgctgtttgtgatatagcatctagacttaggaaagggcaggaacaatttaaaagcacatctgtaggcacaaagagaattataatagaaattcagaattcctaggcatatgacctagactaaaatgtcttcataactacaaatgaaatcagggtcatttatagtacaaactaccacagaagtcagtagttaggggatggagatagatatgaaaaaaaaaaaaagcaaacccagcctaactcccagggagggaagaggggcgacagatatgcagctacacaatgtttttactatcttgagttctttttacccagattccatagctaaatccagatgtattaataggtagagactacttcagaaaggatgagactattttcttgcttaattatccacacagtaattcagaaatgtatattgaacactttttatatgccaggcactgctgggcactggaaatataaaagtaagcaaaaatgaaaaactatcctgtcctcctgaggcttagcatctaagggagacaggcattagtcaaccccgtgtggctgtgaatcagccatgatgctgagtgctacaagagaggactgtgcggctgggagggcttataacaggatttgacctagttagggaagatctgaggaagtgatgaaagaatggaaatcaatatgtaagagctcacaagtcagagtgagatgtttcttcctatactgcctgcttctaatgagcatccacttcattgaaccacctcttcattgagccaaacctaccatacagggatacattctctggaggaaagttgagcaactattgcatttgggacattagagtatgggtgggctgacaggtatgtgtatgtttattatccaagacagccaaggtgtttatcctgttacaacatcccagaggacagaggctcttatttgtgactcttttttcttacctgtaacaccagaggcataacgtacatcataatgctgcatcttgttgacgcttcaatgctcacaattcaaaggtgatttctgaagcactttgttacactggggacagctcctaaatcctcccactctttttttgcctcaccttggagtcttgggctctgttgatcactgactctgccaggtctttcagcaggcaagacagctcagttaaattgagtttggactccactgtagtgcatgcatgagacagcacccccaatccccaacacccacacacaaactttaaatatttgtaacagaattgttaccattaatattgcttaaaggctaacacattagccagaacctagatgtcttctggaaattttttattgcaatgttacttcatctacataaagttgtccaatcactgaaacctccaactgaaataaatggtaagctttttgttctcaattctgaaatcagattcattaaaaggcacatggggatagatgatataatacaacaggcttcttcatgggaagcagttccctagatgtatgaggtaattggaaaattcaaggctggtctctcaggtgcatataatttatccaacagactcgagataaggctgattttttttccaagtggtatttgtttaaatgacaaatactgaggttcgggagaagggaagtctggcttataaaaacagataccaaggagatccaaactaaaaattctaccaattagatctttattcactgatcataatattaagtctctactatgtgccaggaactgtcctacatcgggacagtatggtagtttaaaaatatccctgccctcatagagcttacaatctaatatgagaggacagacaacaaacagaatatatacatgttggcctgtaatcccagcacttcgggaggctgagatggccaggagtttgagaccagcctgggcaacatggcaaaaccccatctctacaaaaaatgcaaaaaattcaccrggcatggggtcgggggggtggtgtgcctatggttccacctactccaggggctgaggtgggagaatcacttgaacctcgggaggcagaggctgcagtgagccgagattgtgccactgcactccagcctgggtaacagagagagagagaccctgtctccaaaaaaaaaaaccacaaaacaaaacatatatatatgtgagatggtgatgaaactgggcaactctggggtgggaagttgctattttgtacagggtagttagctaatagggtgatttttgatactggagcgagaacttgagaggaacatgaatcatgaaggtatctgtgaaaaaagcatttcagatggaggggcagtgattctaaaggccccaagacagtgcttggagtttgaggagcaccaggcagaccagtttggctggaatagggtgatggaggcggatgggtgggcagtaagagcagggatccagatcatgcggggtcttacatgctgatgtaaagactcacttttctgagatgtgcggccaatggacagtggtgagcagaagagtgacatgagctgacatattttaaaagatttctctgatattgggtggtcaaaaaagataaagattgggaattggccattggattctgtaacctggagtttactggtaaccttgacaagagctattccgtggagtcttgaggatgacagactgactggattagatcttacagagagtgggagggaaactagagataccaaacaacaattcttttgaggtccttttaaagaggagcagaaaaggggaaaggttgctaaagggggatgtgaaattcttcttgaaaactcagccctaacacccaatgcgactatatttggagaaagggcctttaaggaggtgattaag

SEQ ID NO: 95840 - DNA, 31558 bp, Homo sapiens
gcacacactgggagcatggctatgtgttctgcagggatctctgaggctcagggatgagcatcatgattagcctgtgggtcagggaaagctaggcaacccctaggaggagtcggcaagaaggagaatccagaagaggcactcctggcatcatgaagagcaggtgaatttccacagcctggtgagttggaggagccctgagcagtttgatacagcatgaacctagaggaaggtggcggggaagggaggggaggcagacaggcctgtggggcccagatcatgaacagacttgtttgttatactaggaagtttgaactgtatgctgaaggcaatgggaaccaagcaaaagaggttcaagcaggccgatggcataatcagatgtgcattttatgaggctctttctggcagcagcctgtaaaaaagatatgcatggaagtgagattagaggccaggtgaggcaaatatatcaagatgtcctaggggtggtccaggaacccagcaccaaatggctttgagacaatgcaaaccatgtggcctagctctagccatgggagcctgggaagctgttttcactttctttctccctgtgccaggtgagggggtgggtgccatctagatctagtttcataaaaccttgggctccaggagaaggcaaagatttcacgcaatgacatcttgaaaccctgattgggcttcatgttctgccttttttcaccaaccaggggggttcctatggggatggtggagccctgaggaactgttaccagaagccagtgctgaggcataggccaaggaccttgaggtccaactgaaagggaggatatttgggaggcccaggtgccaggtcgatcatgttttaaatgaagtgtctagggccttagcatctgaggggtggccagagaggggactttcagggtatgtagacaaggcagctgcatttcagctgattggggttggcattctccaggagaatcagctgaaatgcagctgactggggtgcatccttcccaggagaggccaaggaagagaggggagatgtcaggaatgggtatctgtagcaacccaaatgtcaacaggagatctttttttttttttttttttaatgtttttttttttttattattatactctaagttttagggtacatgtgcacattgtgcaggttagttacatatgtatacatgtgccatgctggtgcgctgcacccactaacgtgtcatctagcattagatatatctcccaatgctatccctcccccctcccccgaccccaccacagtccccagagtgtgatattccccttcctgtgtccatgtgttctcattgttcaattcccacctatgagtgagaatatgcggtgtttggttttttgttcttgcgatagtttactgagaatgatggtttccaatttcatccatgtccctacaaaggacatgaactcatcattttttatggctgcatagtattccacggtgtatatgtgccacattttcttaatccagtctatcattgttggacatttgggttggttccaagtctttgctattgtgaatagtgccgcaataaacatacgtgtgcatgtgtctttatagcagcatgatttatagtcctttgggtatatacccagtaatgggatggctgggtcaaatggtatttctagttctagatccctgaggaatcgccacactgacttccacaatggttgaactagtttacagtcccaccaacagtgtaaaagtgttcctatttctccacatcctctccagcacctgttgtttcctgactttttaatgattgccattctaactggtgtgagatgatatctcatagtggttttgatttgcatttctctgatggccagtgatgatgagcatttcttcatgtgttttttggctgcataaatgtcttcttttgaatagtgtctgttcatgtccttcgcccactttttgatggggttgtttgtttttttcttgtaaatttgtttgagttcattgtagattctggatattagccctttgtcagatgagtaggttgcgaaaattttctcccatgttgtaggttgcctgttcactctgatggtagtttcttttgctgtgcagaagctctttagtttaattagatcccatttgtcaattttggcttttgttgccattgcttttggtgttttggacatgaagtccttgcccacgcctatgtcctgaatggtaatgcctaggttttcttctagggtttttatggttttaggtctaacgtttaaatctttaatccatcttgaattgatttttgtataaggtgtaaggaagggatccagtttcagctttctacatatggctagccagttttcccagcaccatttgttaaatagggaatcctttccccattgcttgtttttctcaggtttgtcaaagatcagatagttgtagatatgcggcattatttctgagggctctgttctgttccattgatctacatctctgttttggtaccagtaccatgctgttttggttactgtagccttgtagtatagtttgaagtcaggtagtgtgatgcctccagctttgttcttttggcttaggattgacttggcgatgcgggctcttttttggttccatatgaactttaaagtagttttttccaattctgtgaagaaagtcattggtagcttgatggggatggcattgaatctgtaaattaccttgggcagtatggccattttcacgatattgattcttcctacccatgagcatggaatgttcttccatttgtttgtgtcctcttttatttccttgagcagtggtttgtagttctccttgaagaggtccttcacatcccttgtaagttggattcctaggtattttattctctttgaagcaattgtgaatgggagttcactcatgatttggctctctgtttgtcgtcaacaggagatcttctgagactcttggtttgctcccagatgcttggtagcttccatgtggcagtgtctacacagcaacagaactcttgataattttccccaagctcacccacccatgtagcatttgttgagaattccaggaatgggagaaaggatggagtggggtctctcagggtatgtaaaacatacttggagctgagcagtgggtgaactctaggggtctggcttccaacaatgagtcataaaaactgggagaaggtcaagattcaagatagcccttgtttctcatatggtttatgcaaagctcctgtgctgtgagagaacattctgcattcaaggagtttacagacatttagggtggctggagtgagaagtacaaggaggtgggtgtatgagcgaggttgagaacagaggccaagtcaaacagagctttgtaaatcatgtcaaatatttgaacaaatgtctgaaacaggtgcccataactggcttttacaggttccctgtggctctcgttatacatgagtggcatggagatttcagttagaagcttagaagggctggggttcaatgtgatgctttgatatatgtatatatcgtggaatgactatattaagctaattaacgtatctgttgcctgacatacttatcatcttgcacaatgagaacatttaaagtctactctttcagcaattttgaagtttataatatattattactaactatggtcaccatgctgtgccatgctgagaccatctcaaaaacatcttcctcttgtataattgaaactttgtaccctttgatcaacactacttgttccccaccccactgcactcctcagccttttgtagccaccattctactctacttctagaaattcaacttttttagattccacatataagtgagatcatgctgtatgtgcttttctgtgcctgttttatttcatttagcattatattatccaggttcacccatgttgtcacaaatgacagaatttccttcttttcaaaggctgaatagtattctgttgcatatattgtgtatgcataccacatattctttatccattcactggttgatagacacttagattgattccatgtcttggttattgtgaatgatactgcaatgagaaggagagtgcagatatctcttcaacagactgattttaatttctttggatatatacccggaagttggatgactaggtcatctgttcattctaatttccgttttttgagaaagctccatactgttttccataatggctgtactattttacatttccacggtcagtgtacaagggttcctttttttccacatcctcaccaacatttctcttttgtctttcttataatggcctgttagaaacaggtgtgaagtgatagcacattgtggttttaatttgcatttccctgctgttggccatttgtacatcttctgttgagaaatgtctattcaggtcctttttccacttaaaatattggattgttttcttgttattgagttgtttgagttccttatatgttttggatattaactccttaacagatgaattgtttgcaaatattttctccctgtttatgtgttgcctctttattctgttagttggttcctttgctgtgtagaaactatttagcttgtatttctggtgctacagaaatacagaggatcataagaaatgactatgaacaattatttgccaaaaaattggatttttatgaaatccaatctagatgaaatggataaatttctagacacatacaacctgccaaaactgaatcatgaagaaatagaaaatctgaatagatcaataattagtaaggagattgaatcagtaataaaaagctccccatcaaaaaacagcctaggactggatggcttcatagctgaattctacctaatatttaaagaagaaaaatatcaattcttctcaaactcttccaaaaaattgaagcagagggaatactttcaaattcatttctcaagcctgcctttaccctggtattaaatccagacaaggacactacaagaaaataaaattacaggccaatatccctgatgaacatagacgaaaaaattgtcaacaaaatagtagcaaattggattcaacagcacataaaaggatcatgcaccatgatcaagtgagatttacccttggggtgcaaaggtggttcagcatacacaaatcaataaatgtgatacaccatattaacagaatgaagggcaaaaaccatcatctcaatatagaaaaaaaatttgataaaattcaacatcctttcatgattaaaactctcaacagaagaaatgtacctcaacacaataaaggccacatatgacaaggctacagctaacatcatactcagtagtgaaaagctgagagtttttcttctaagctcaggaataaggcaaggacgtcactcctgatacttctgttcaacatagtgctagaagttctagccagagcaattaggcaagcaaaagatacaaaaggcatctaaataggaaaggacgatgtgaaattgcctctattggctggcaatctggtcttagagaaaatcctaaagactgccaaaaattgttagaactgataaacaaatttttcaaagtttcaagatacaaaatcaacatagaaaaatcagtagtgtttctatacactaacaacaaattttctaaaaaagcaatcaagagggccgggagcagtggctaatgcctgtaatcccagcactttgagaggtcaaggtgggcagatcacaaggtcaagagttcgagaccagcctgggcaacatggtgaaaccccatctctactaaaaatacaaaaattagcctggcatagtggtggtgcatggctgtaatcccagctactcgggaggctgaggcaggagaattgcttgaacccgggaggcgggggttgcagtgagcggagatcgtgccactgcactccagcctgggcgacagagcaagactctgcctcggtgggggggcagtgagggagggaagcaattaagaaaatcccggctctctgytcctcccattccacagacagctgcatcttctcgtgtagcgccagctgcatccctgagacatcatggtgaaggtgaagcctggagtcaatggattaggctgtattgggtgcgtggtcaccagggctgcttttaactctggtaaagtggatattgtcgccatcaatgatgmcttcaatgacctcaactacatggtctacatgttccagtatgatttcacccatggcgaattccatggcactgtcaaagctgagaacaggaagcttgtcatcaatagagatcccatcaccatcttccaggagctagattccaccagaatcaaatggggtgatgctggcactgggtatgttgtgaagtccactgacatcttcatcatggagaaggctggggctcatttgcagggggagccaaagggrtcatcatctctgccccctctgctgatgcccccatgttcatgatgggcttgaaccatgagaagtaggacaacagccccaagatagtcagcaatgcttcctgtgccatcaactgcttagcaccccaggccaagatcatccatgacaactttggtactgtggagggactcgtgaccacagtccacaccatcactgccacccagaaaactgtggatggcccctccaggaaactgtgtcataacagccgcagggctctccagaacatcatccttgcctctaccggcactgccaagcctgtgggcaaggtcatccctgagctgaatgggaagctcactggcatggccttytgagtccccactgacaatgtgttggccaggaacctgacctgctgtctggaaaaacctgccacatakgatgacatcaagaaggtggtgaagcagcatcagagggccccctcaagggcatcctggcctacactgagcaccaggctgtctcctccgacttcaacagtgacacccactcctccacctttgatactggggctggcattgccctcaatgaccactttgtcaagcttatttcctgttatgacaatgaatttggctacagcaacagggtggtggacttcatggcccacatggcctccaaggagtaagacccccagaccaccagccccagtgacagcatgagaggaagagagaggccctcactgctggggagtttctgctgcactcagtcccccattgcactgagaatctcccctcttcacaatttccatgcagatcctctgaagagggaggggcctagggagccccatcttgtcacgtactatcaataaagtcccctgtgctcaggaaaaaaaaaaaatcccatttacaatagcattgaaaagaaaagttcatttctgctcctgttgtcagcagctgtggctctgctctgcatgtcttcttgttccaggatccagctgtaaagcagacccatcctggacacaccgttttgtggccgagggagaagagggcccgcagacccacgtggtgcttcttcaagccactgctcaccaggtggcacaggtcacttctgcttacaccctattagccaaagcaaggcccctgtccaggcctgagggagtggggagaggacctacgcctctcccataggccacaaagggagggtaagggataactggggacaagaataggatttgccacactccttgtttttaaatgttagcaactgaattgaaagtatcataaatgctgggcagagccaactaaaacacaagaaaccatgagccatggatgtacaacctctaatttaaaaagtcagaaatggagtgaaagccttgttctcttccttgagacacacacactacctcagtctcctgagtttaacagtcctctcaaaaaggaaaagtggttactttgcctttaacattatgggtgaatctatactagttcctagtgtaacccagcacccctgtttttctagaggtgatttaattgtttttttccttctctctctcttcttttctcatctccctgkcccccttagcccttcagaaatgcaaatataaccattctcctccccatcacctggctttccctacagggcaagtttttctaactgtgtgctccaagacrgatctctccttgagagctggcagtcgatttgcagaccaaagcayacccaccaaggaattttcacatccagaggttgcctcggaacttccatcttcccagggttgcctcaggactttcatccaccaggaggggaaatcgaaagcacacccgcttggccrctttttcaacttacttctgcccaggaagcgccaactcatcaycaagctaggagggagaccccctgcccttgctcatttcctcccttaccttataaaaatccctgctttctgctcccaaagtgaagcagcacattttaaggcaggaccctttgtgccccttccccaagctaactttggaatcaatttgcttttttttctatcagaccttgctcttgttaactggactccacatrcagcgagcaactaacctgcattttagttacactggtaatcactacttccttttgtaggtgctcataaattctctttaaacaatttattcataaatatgaccagaatctaggtcatttgccgttctgtaatctccagaactcaacttctatttcttgcacttaggacatttgcctgggtccagtgctatggcaccatttttgctcactacagtcccacaaagattattgatagaactgagcaatgcatttgcaagatctcttagcacccaagggtaaaatgtttttgggccaagaaacttgacaccacttccaattgcatgaagctcttttacactcccttaactacttttttatcctggaccctatcattgtctttaagaaccatatgggtagaatctggaagaaactgccattcaaaccagcattactttttgttcagaaagaagatggtgaattactcagggttgtccagarggacagaacaaataggatacatatatataagatacatatacatttgtatatatacacatatatatacatgtatcctattggttctgtccctctggagaaccctgagtaattgtatatgtgtgtgtatatatgtatgtgagtttattagggakaattggctcacacaattacaaaggcaaagtcccacaatagggcttgcaagctggagaatcagaaaaaccagtagcttgtctcagtccaagmcctaagcctcaaaaccakgaaagctgacagtgcagctcccagtctgagactgaagggctgacagcaccccagaggtcactggtacaagtcccagagtccaaaagccgaagaacctggagtcagatgcccaaaggcagaaggagaaaaggaggcctgctctagaagggagagagaaagagaaagccccagcaagctgcatatgccccttctgcctgctttcttctgcctgctttcttctgcctgcttttttctgcctgctttgttctgctgtgctggcagccaaccagacagtgcccatccacagtgagggcgggtcttcctctcccactccacttactcatatgtcagtcttctctagaaacaccctcacagacacacccagaaaaagtgcttcaccaaccatctaggcatccctcaagcccatcaagttgacacctaatattaaccatyacagaattcatctgaacagtcagcccttgggtcacacttcatgggtatttttgttacacacatatgcctggaacaagtgcccagtgtgctctttggaacaattataaagtcatcattattctggatgatgattttaggtttggatgataaatgttttgttttggttgtgtatgtttttggatatggtcaagcctgagctaagtctctataattttcttgctttccaggaaggagtgaaatatttcttaactcggtaggaatgtagtgaattacagtgtttgcttatccttgcagagtggagagtgttttttgccagagcaattgtttgcaataccagccagcccagaggactacagaaggacattcaggcagaatattcacctctccctagaagacagcctataaaagagaactaagtgtgttcaatggacagtttctgcccttcaagtggcattattgaagtataatgaccccaaagcccttgagactattgtgttctgatggggctgttgtactgggtgccacaggatgagatcataggcctggagtgagggctgggtttcctgggagaatagatgtcccatcattggtcaccagggaggagcaggtgttgggcagaaataagtgcagggaggcagcttgagaatcccttcccctttctgggtcttgggtggggtggggctgggattctaggcagagcagacctgatttgagggcacttgcactgtgtgcagttgtgctggctcatgccacatgacaggataggagccctgtaggaagacagtgcagctttgtccaacagagtgtggccaagctgtgcacccaagggctgcccttgctgggagaaaggcacgccttcttcttgacacaaaggtaccacctactaaccgaacccttacctgacaaggacctgcccaccaagtgggatctctgtcttctaatgtatctgcctgccttgcaggtggggagaggggacacatttttctatttttttcagcctggtgaagctttttctgcccacaaagacatcttctgcatgccaagccatcagcctgcttaaggtgggtacattttcatcaccgggcatttctaaatctgagtctgaggatcctgaaattcacaacatcttttaattgttgttagttattatccgccttgttctttctttctttagctttttaaaaattaaaatagcgacagcatctcgctatgttgcccaggctggtctcgaactcccaggctcgagcagtccagtcatcctggtctcccaagtgttgggattacaggcatgagccaccttgtccagccctttctttcacttttgaatgtttattatacacttgttaaagagtcagagatttactgagctcctactgcctaccaaaamctgttttagaccttggggttacataagtgggggtgtgggtggggtacaaaaattcctgcrcttgtgcagcttgtgtattagagagaggattgtgctctggggactcagggaatgctgtgtcctgtgcttaggatggaaagcaaagggaagtccggcatccctcatcccaggtgctggcagcagcagagctggctagctatgccctgcaaagggtccgtatcctgagtgtcattagcatcaggggatgatttggggtagtgaacaagcatttgcagctccgcacccagagagaatctcagaaatatctgaggaaccctttgcgagggctaaattctggtggggtatttaatgggtgtgtgaagtctgctcagagcaattttatgtggctttgtttccctctaatcagcactaattctgccctttccagtctgaagatgggtcttcttgactgagaaccaggatgtaaagtacaatttgaggagttctgcctgtgttgttttgttttgttttgagacagagtctcgctctgttgcccaggctggagtgcagtggtgcaatgttggctcrctgcaacctcctcctcctgartttaagcgattctcccgcctcagcctcctgagtagctgggactacaggcatgcatcagcacacctggctaatttttttttatttttagtagagacaggatttctctgtgttggccaggctggtctcctgacctcaggtgatccacctgcctcagcctcccaacattctgggattacaggtatgagccaccgcacacagcctgaattctgccttcttgctatcatctgttaacaaaatacaattagccccaattagcctcccttttctcttgagctgtcttctcattgagagtctcttttctgaatacttctgaactctgctttccgaatgggttctgcctgagccccggataccaccaactttgcaaaaactggctcctcttagggtccctatcacttccacttctgcagagcacttaggtacagggtagcagtccctctcatttctttctttaaactatgaaagatgaaattgtcagcatgaggagaatttatcagacacccagggtctagaagaaggagattcccagctatccccactcgatcttgcctccgtgccagcgttgtcaaatgtgttgtcagaaggcctgctcatgcctttgagccccgagggcagagccacctgcttgtggacaagcaggaagaaaagccacagctcagcagcagacagccatctggtgaaattccatgcgcaactttgtgtctgctggctcctgcccctccgtccatccaccccagcagaccccttctggtttctagcctctgttcctaggtcctcctctacctgtgtctgcccacttttacaactctctttctagatttgactcacctgtgtcacctggtttctgctctttgattgaccttgaacccatatttgtctactcttgagtcaatccattttgcttccagtccctgagcccagatgtgcccactcctggaactgcctaccagggtcagccagttgctgctgcctgactcttggctttctatgyctccaggccctgattttccctgctagtgagctgcatgtggctctctgccccaacccagcatgtggactgtgattctcaggagcgtggcttccaggccttaaatctggctgcacaacctcttgtgcagaccacagtcccccttccctctctctccttaccttctccattactctctctactaatggtttgtgggttttcatgcaggagctctcatgatggtctcctccactccattccctcctagctctgtcttttgagaaaggaatgctgttccattgctgccatcccagctgcctgggctcagagaaccagcacaggcacaagggctttcctgagctatgatctcaaggtcacttgtatcagtgcctatactctgttgcctgtggtgcagacatccaagactgcaaagttttattctccctggtttattttatttcctgtgaattactggagatttcctccattcttcttgtggtttctatttcttttcttttatcaggctctataattttgctgctgtagccagtgcgttgttttgtacattctcggttttaaaaaaatgatggaaattcaattccaataagcgccaatggtagagaggatttgtgggctcctgtaaccaaaacaagaagggcagaaacagggttggacatcagtggccactagaaccagaagctggaggctctcgggacacgctctcctcacccttttttcctgcgtgctgcaggcagctctatgctctctggctggctttcctctcaggctggaggcatggatgccagcagttcccatctcacatgtttccagttttgcatccaacagggcaggacttgcttcttggttcaaaacacctttgaaagcacctggttaggccaagtacggtggctcatgcctgcaatcccagcactttgggagggcaaggagggtggatcacctgaggtggggagttcgagaccagcctgaccaacatggagaaaccctgtctctactaaaaagacaaaattagccaggcgtgatggcacatgcgtgtaatcccagctactcgggaggctgaggcaggagaatcgcttgaacctgggaggcagaggttgcagtgagctgagattgcaccattgcactccagcctgggcaacaagagcaaaactccatttcaaagaaaaaaaaaagcacttggttaatatcttggaatattaggtcatcttacagtccaagggaaaatgagagaagcccttacagagcctcatcattggggggatgttcctaagtgaaaggatgtcagtgccagaaagaaggagtcttggcagatgataaatgtccactgcagaccaagattaaatacatcctggctctgaccatctctcatctctttccctctaagtgctcttccccaagttaggagaaatcttcttttccagaagtcttcctgtttgacaacttggttatggagaatgtgaccccagtacacaaagatttctgtgggtaaaatgtggaaggaatatatattgacaacaatggtggtgaaaagagagagggagaggaggatcagagtacactgtagttttcacatgccgctcagcaaatctagaccaagtctctagcaacattttcattgacataagctaactcaagcacatctttgggctttcattataactgtgagtggatacctgttatagagacaggcggttagcgctagagcaatggttttcagagtttcagatgcagcagaacagtctttatttatcacaaagaaaatagcatgaactttaatatgtagaacagatcagaccagttatactgtaattgaagtttcccttctgctaccctccacaggaacctgagctccacaggactcaatgaaaaagcaactgtaacagaagagataggtaagttatgttctctgtttactttgtttatgtctgaatttactttgaaacgcttcagcactggcagtgtgatttgctgtatatgttatttagatgtaatctgcacccaagggatgataacttactgtaattgggaatgcatactccagggatggttagctaatatttaccaaagcagcagacaacagagaaaatgagagccaagtgaaaggagaaatcccttataaaatcatcagatcttgtcagacttatttaccaccatgagaacagtatgggggaaatcaccgccatgattcaattatctccccccaggtccctcctacaacatgtgggaattatgggagctgcaattcaagatgagatttgggtagagacatagccaaaacgtatcacctgataacaaggttaagaaggggaagaggcaacatcctcacctgctcaaggttggatccaacttttgtggggcctgaggcttacataccttcagggtcttctttggaaaagaaatattaaaaattataaatacaaaattatctatgaaaatgaatgtttatacagaatgagaaaaaatgacttcaaattttttttttttgagatggagtctctgttgcccaggctggagtgcaatggcatgatctcagctcactgcaacctccacctccagggttcaagatattctcctgcctcagcctccctagtagctgtgattacaggcatgcaccaccatgcctgggtaatttttgtatttttagtagagacggggtttcaccatgttggcagctggtcttgaactcctgacctcaggtgatccacccgcctcgccctcccaaagtgctgggattacaggcgtgagccactgtgcctggccgatgacttcaaattttaaaaagtttacaaataccacaaaaatcccccaaataacacagtatttctattaactaatggttgatatggctgtgtaatatattttcttatgttttttgctgcttcctcttcgatggcctcttcatgtcaccagcatgttgtaatactttctatagagagaataaaataatttggtgcttcctctaacttggttgatcaaaatttttcccatgttaatttttaagattcataaaacatgcaacttcaatagacaagttcactctttgtagttcttccacaaggttgtgcactataaacagaaaaattctgatgaatttagttttgcataatatcttcacaaaagaaaacatcatggagtgtttataattgtatacactgcatatagagcacactcctgacagaatgtcctttactagaaatggatgagaacagaatcctccacttagaattgtttatgtcttaatggaaagacacttccagagattagtttctggctttgcacaattaaaaccttgtttcttccccactccctgtaaggatccagtgctgggtgmcacagcataggttcatgttcataggtactctggttctgtatcttcctgttatatcacttggtaagtttgccccgtgggtggtaagaatattcctgcacaggacagctaggaataagttaactatacatggaaatgtctgcaaaccacataaatacctcccactaaacctcagctaaatgtatcaccaactcaactttccttgactagatccccaaaatgcttacagtcactccccaccacctgaaaggggagactggctgaaagaaattcataatggaaagagagagtgccttattccattgtggttcaaatctgtcccttgcaaaatttataaaaccatctaccatataaacagatggctggggactctcccagggccttggaagtggtccatcgcatgagagctctgatatttagcttcatttgtttcataatacaatgcctctccaccaaactatagagggtcaccaatatttaccttgggaacagccagttgaattaggtgggtttgcaacaaagggaataaacggaagacaggctttttctatttataagcttctgcttataatcatcagcaaaacagtcacacataaaatgactgccaaaaacttaacaaaactacatggccaaaagtgcaatttaatgtagtagaaatgaaatacaaattacaacaaagggcgggtgaataaagagggtggatggattaatcataggaggttttctggaaaagatgagtttgaaatagcttttgtaaggagtgaggcatagaaagaaaggagaaaatgcatttgaggaaggcctgaaaggtctaaatacactgaagaacatcaaattgtatatagggatcagctgaaaattgactggaaaggtgtgttcatgaaaaacagcataaaattaaattttaataagactgtttatggtcagaacgaagtaactagcgcacatctagtccaccaagtgtcagcaactagaaaactacacaaaaatattaatatctgaaatagttattttcagttattgaacaataggcatttcaggcgtgagatctcagagagatgagaaacaagtgaggtgagccctgccatagccctagccttttatttcaatgcattttctggaccagttgcaggaaaggggaattcaatcagagtatggcagtctcattgactcaaaaagtcagagactggagttcaggaaggctgaggcagctggatggaacttgtgagacagagtagcagagtgaaagagcaacacagaataagttccagaaatctgcagaggatcctcttgaatctttggctaaataataagatgtatatgtttaaagtgaaactccataaaccctgggaaataataaatgattaaggaaagataaattatggggaactataaactgagcaactaccagagcttgcacaggattgggagatacttgagatcaggccagccagaasggaaagacctcattgggtacttgatgcattcaggtgaaatcccagaaacagtatgtcttactagtagggctaaactagtcctagagcaaaggatactctagactctttctaaaaaagcctcaaagggataaagctgatctgaaattaatttattgcaagaacaaaaatcaataagttttaaagaaacacaagaaaatttaggcaaacaatggaatattcacaattgccagtatccagtcaaaattattagacatgccataagcaagaagtgtaacccataatgaaagggaaaatcagacaatagaagcagatctagaartgacaaagatggaattagcaaacaagggctttaaaacaatgattataaatttgttcaagcaattaagggaaaacaggaacataataaataagtaaatggaaatcattaaaagaaacaggccaggcacggtgactcacacctgtaatcccagaactttggaaggttgaggcaggtggatcacctaagatcaggtgttcaaggccagcctggccaacatggtaaaacccgtctctactaaaaacagaaaaaattagctgggtgtggtggcaggcccctgtaatcccagctacttgggaggctgaggcaggagaatcgctggaacctgggaggcagaggttgcagtgagctgagattgcgccattgcactccaacctgggcagtaacagtgaaactccatctcaaaaaaaaaaaaaaaaaaaaaagaaaaagaaacaaatcagccatctaaagctaaaaaataccccaatatctaaaataaaaagcccactaggcagatttaaaagcagattctacattatagaagaaaaaaattaataaaagacacattatataaaccctagagcaaactattaaaaargttatagctaataagacaatagtgaaaataaaatgaaaaaataaactttttaactcaaaagaagggagagagaaaggaaaacaaaacaaagaaaaaaatgaaaccaataagtcaatagttaactgatttaacacagccatatcaagaattgtattaggtaaaaatggaccaaaatcatctattaaaaggtattattatacttggtagaaaagtatagtaggaccaaaatcatctattaagagatactattatacttggtagaaaagcaacatccaactatatgttttctacaaggcttagttttttaatacaaagatacatacaggtaaaagttaaagaacagaagatatacctggcaaatattaattataaagctagagtggccactttgaaatctgacaaagtagacttcataagaaatatttccaggctgggcgcggtggctcacgcctgtaatcccagcactttgggaggccgaggtgggcagatcaggaggtcaggagattgagaccatcctggctaacacggtgaaaccccgtctctactaaaaatacaaaaaattagctgggcatggtggtgggtgcctgtagtcccagctactcgggaggctgaggcaggagaatggcgtgaacccgggaggcagagcttgcagtgagctgagatcgcgccactgcactccagcctgggcgacaaagcaagactccatctcaaaaaaaaaaaaaaaaaaaaaaaaaagaaatacttccagattaaagggaaatatttcatcatgaaaaaagggtcaattgatcaagaatacttacaatattcaatgtatgagcacctaacaacaaagtttgaacatacacaaagaaaaaactggcagaactgaaagaaaaaacacacaaatacaaaagtatagtttgagatttttaataaccccctctcagtagttgatagaacaaaatttaaaacaagaaagtaaaaactatcttctgatttttgtagtccctccccaaccaaactcccaatactatgccagtcatcaattccaagctaatgtttgatgaatgaaaaaaatcctcaaaataagctttgttttccattaaagagaaaacaacccctaaaaataaaaaataaacttctactagcaagatggataaagaaagaaaaagcaaaaacacaaaaataaatattaataataaaagaagggacatcattataagtcttatagacattaaaaaataaaaaggggatattatgaaccacttatgccaacaaattaaaaagtttagttgaaatggataattcctttgaaaacatgaataactcaaattgacactagaagaaatagaaaatttcaacaattctatgttaagcctaaataaattggatttataacttaaaatcttctgacaaagtggactctgggcctagatagattaaataatgaattctatcaaacatttaaaaaggaaataataccaatcttaagcaaaatctttcagaaaatagagggggaagaaatacttcccaactcattttatgaagtcaccattattctaataacaaaaccagacaaagacattaaaagaaaattatagtctaattccttatgaacatagcatagataaaaaattcttaacaaactattagcaactagaatccagaaatacaattaaaatgataatacatcatgactgaatggagtttattccaggcatgcaaggttatttaacatttgaaaatcaatcattgtcattcatcacattaatagaataaaaaagaaaaatcctatgatcatttacaacaatgcagaaaaatcatctgatgaaattcagtgccttgttatgatttttaaaactcagtaaactaggaataaaagacaaccatcttaacctaataaaggaatcaatgagaaacctgagcaaatactgtaaattaatattggaagactcaacattttcccattgatattgagatccaggcaagaatgtttgttttttctcttctattcaacattaatattggtgtcccaccagtaaaataagaccaaaaaaaaaaaaaaatcttacagattagaaaaacagaagttaaactttttttattcacatagtacacaattttcttttcttttcttttttcttttcttcttttagttaatagagatgaggtcttgctgtgttgcccaggttggtctcaaactcatggcctcaagcagtcctcccacctcagcctaccaaagagctaagattacaagcatgagccaccatgcccagccatgtacataattttctatctagaaaatacaagtctaccctgaatggctactacattaataagtgaatttagtaaggttgtrgaatacaaagtcaacataaaaaataaattgtatttctgtatacaagcaacaaataagtgagacattaaaatgtaaaacatcatttacaatagcatcagaaatagataatattttggaattaatttaactaagcatgtataggacctatgctaaaaactacaaaaaaactactgaaagaaattaaagacatttaaaaaatggagacacataactgtttgtgaattggaaaactcaatattgttatgctgtccattctcatcacattgatatatagattatatgcaaccccaatcaaaatcccagcaggcattttttctttaagcaattgtaatactgaacctaaaatttgtaagaaattraaatagcctatgttagccaaaacaattttgaaaaagaagttcaaaactgaaggacttaatttgatttcaagacttactttaaagctacagtaatcaagaagtattgcctctggctgcttcctcattatgatggtagagttgagtagttgtaacaggaaccatatggcccagaaggcctaaaatcctatctggcctttcacagaaagagtttgctgacctctgtgatacatgatgctcatgtgtaagacactcctatctataattcctggcctacctggtattattccaccactttctctgttactcattatagcatattaaagtgcagatgagggaaaataattttagaaataatatttaatcccttctaatttatttaaaatcaaaattgttcatagattttggcactttatggttaataatatgttatttgcaatatcccttacaactgtatacaaagccatagtggaaaaccagtcctaccaggatgaagataattacacattaaatttgtattctatgtaaatatgtatatgaggcattataagcattatttgacccattttttaaatgaggaggctgactggcaaatgcatctattagagcctgcagaaagtgaggaaggcatggttaggaaaaacagaccaattggacagtggaattaataggttcaaattggtgatagattggacataggtaatgaagacaagaaagtattggaaaagtaattttgagagttgttgtgaatctgggtttttagacagggttgccattgacctggtaggaaaattgtgaaaaaacatttatttcgccactgagagcaggttgattatgagttccatttctaattgcttaaagtggtgctttccaaattaatggatttacaaagtacctggtcatcttgttagaatgcagattctgattcagtagttttgtgacaaggcccaagattctgcatttccaataagcttccakgtgattctgatgtgactggttcaggaaccacacttttttagaaaggcattaaatgtgactaaaggaaatccaagtgtagatttcttctggaaggtaagaggagggtcctgacagggaatactgtttatgcagttggaaagaacctatttgtcttctctagaggcaagatacataactaagggcctgtaatcttgaggagattctcagtgcagagaagagaaggatccagaacaatcaaggagacagaataagagctatcagaaaactagaagaaccaggagcatttagcatcattaaggaatcctatggaatattgaatttcaaggagtcaatcaatgaattccaacatgcaactcattcatcacacaatctttcctggccccctttctttgcctcctttggtcttttttccagcgctctctagaatgtagtagatgcttactggactgtctgtccaaagcttccccactcctttttttttttttaggaaagcctcccatcatcaatatgactaccataagagctgccatgtttttatgtgactctctgtcctcttcctacagttgattggtccaggcatggacacctgatcccagctcaaccaatcataaatttcttctctgggattattcaaactaggattctacagagacaaaagttgtcaggtgcaaaacagtctttataataggaaaagtcgtttggcacaaaatctactagtcctaatatgcagccatgttaggagccaatagagagaaaaagtaaagacaggtgatggaagacagtcctagaagtgttccagtttttgttccaactgttcccaagcccaattactttcgttcctttcccatgatttggttattcaatgttcccttcagtgacccagaaaactccccctgttgcctaagtgagtttgagtcacttgcaacagaatcctgactaatacatggcaaactttatccccactcattttgtcttatacaccatcttcctttgggcccctgcaccctgttgactgcagctttcccaggtttttcctcagaatgacaccaggccaaaaccagctgctgggcaaggaccataaaccccactgtcggtcttggtggatgttaatgtgtcactgaacaccaatgtaccaaatcgatgtattcatggcaacagccgaaaagagcccacaaaagtctaatctttggcacactgggggcttcactggcagattgttaagaccctgggggcaaaacttaatttgcataagtatttgcaatgcacaatttcctttttattcatttacactaaattaaattcattttggaatccccaaagttattgctgttgacttctctccccttactttatgttctaggtatatttccccaaaactgaaagccattttcatctcttgttttctggatgcctcagatcccaagtgaggttttatccctccacagttctttaagattagcaaattaaattaactccttaactgctgggaaattyaaaaaacaaaaaaactgctgttttgcaaaaatgcaaatattattagaacgccctactctcttccctacccccaacacacacacacacacacacacacacacacacacacacacacacacamtggcacgcacacaggcctggctgcgctcgagaagcccacttccaccaccccttctgcagacagaaatgctggcattcgtaagctgtcacactgaggaagacagcagctgtgttattccatgatttatagaacagatttgcatttccttgcctttgaagcttgcctataatctgacacataaatatttgaaagacaggatggtggaaacagacctaagcagcttaatcgaacactcggcaggtagaggacttgggctggtgttcatttcaaacacccccttgccctgaggcctcttggtgtgtgtgtacaaaattgaaattcggtgttcaaacccaaacctacagtcacaattccacttgaaggaaaagtcagaagaatgcccctctgaaagcaggttttgtttcgtctggtctcctgaggcaaaagcccagtagtcttccttaaattctgctccaggaagcaggaagcagggagtataagtgtctcaaccactccagaagccccaagtgtgctcatgcagggacaggagctctgccctgcctcacagaggccctgaggccacagagaggcactttcaccagtgaggaggcacattcctgtcctggagaccagtcatagctctggctgccccagagaaccaggattccctggaaggggatcaggcaagccttcgattttccatgcatccaccttcatgcagcttttcccaaaatatcgtacggagaacactttttgaagttcatgttaaatggccacagtcacactgcttttttttttttttttttgagacagagtctcgctctgtcacccaggctggagtgcagtggggcgatctcagctcactgcaagctccgcctcccgggttcatgccattctcctgcctcagcctcctgagtagctgggactacaggcacctgctaccacgcccagctaattttttgtatttttttttttagtagagacagggtttcaccgtgttagcaaggatggtttcgatctcctgacttcgtgatccgccccgctcagcctcccaaaatgctgggattacaagcatgagccaccacacccggccaacagtcacagtgcttttttagcccattataagctgtaagtcctgcaggaaaaataacagtctaagttgatttaatctgattatttaaatgaaaaatacgcactttcattttcacagtagttctattaatatactattggagaattaaaaaaaagaaaattggccaggcatggtggctcatgcctgtaatcccagcactttgggaggctgaagtgggcagatcacctgaggtcggaagtttgaaaccagcctgaccaacatggagaaacccatctctactaagaatacaaaattagctgggcgtggtggcaggcacctgtaatcccagctactcgggaggctgaggcagtagaattgcttgaacccgggaggcagaggttgtggtgagccgagattgcgccatcgccctccagtctgggcaaaaggagcaaaactccatctcacaaaaaaaaaggaaaattatgccctagtctgattcaataaatatgtgttgatcccgcatatgtgctcaaggaggctagccacaaaggtgtcttcacactcaagacagcccaagaatgccactcatggcctaggtgtcttatcagaagttctacaaggtagagggtgggcaggggaacagaaagaagaggctcttgaatgtaaaggaccttttataaaattcaaaagggacaagggcagaaggcacattgaatggagacccagactgaaagtcaggaaacagggtcagtctagctctgccatgaggtgcatgttcttggtccaaccacttcacctctctgggcctctgttttctcatctgcaaaatgaagcagttgacctaatagcctccaaagtttctttcatgctgatattctatagcaggctggggctaaatttagatttagatttgtccaaatgatggaatgacctcttttcccatcacttcccagatgtctacctggattctggagctccaggaaagaacccccctgtgttcacaatggcggtccctggtgcctgcagaacttaggacagggaattggggaggtggggtggttagggacaaaacccaaatatggactccttaagagaaatttcaaccttaaaaagaaaggaatctgtcccaggcagcagcacagttgcaattcagaggaagctgcggttccgagtgtagggtggtggactctactgtaatcagcccaccctaatcagccaccctgaagtcaagcagacatctggggtgtctcaccaatctcccagcccctagaatgccaaacaaccctgctctgaggccctgtaatattatcacatgggggtcagggagctactctccttcaatacttccaagcaaactgcctagagccaaaagtccaggaagactaagcactttgcagatttgagtgagaaatccccagggacttccatagaaactgggagtctcagaaatacctaccaggttggtttcctgaggcagtgagccagggaaggaggactgatggtgatgttgcctcatttggatactccatgagcctacgcaagtttcacaaaagcttcaaaggaaaacaaaatatcaaatgaatccagtaacaacattctggggaaaaggctacctggaagagggacaaaaagggatgagtttccagaggaagcctagggaggatgcctgatgtcactgctgacagaggaagcaggaggactcagcgctctctggactgaccaggctgtgatgggtgtggcaggccagaactggacaggatcattaaaaccctcggagaggttttcactgcaagaaagaagagctaccaggcctggaggggaataagattggggacccaggctgccagtgaacttatgcccacccagaaactcagccgcagaaaagtggtagggattattacaccaaactgagaattacagtctctgcctcctcagcccctggcagagctgccacacatggcaggagcactgtcctgcctccaggtgaaataggagccactgggatcacccaccacgctgcaggagctatgaggcgtacaggagcatggggaagggatatcaacacacataaacaaagtagttccatccttgccttatgtctgtcttttttatacctccgtagatgtggccaacaaaattgctccataaattggacactgcccaaagaagtctttaacgccattcctgggttctttgtyaaaaccatggtggcttttcctgtcttcacagagctaagcccattgttttgtggtccctgcagctgtacctctgacctgggtggagctgcatgtctaggcaggagaggcttgggaagctagagttgttgctggtgatctgttttcagcttggggcaggagccaggctgggtgccagaagcaacttttgattagtcattaggcacagactttgcttcagccacacagccacctcattcctgcctcagggcctttgcacttgctgttggctctgcttggagtcctctctcttgatctgcactggacttgttgctccctacttcatcaaatgttaccttctcagaggaccttccatgtccgcctccagtgcaggccctgttcacactctgtccactgctctgctgatttccttatgatagttacggcactctacaaggatcttgtttatttgtttacatggccaccgtctctttccctacgggaacgtctggaagcttagctccaccagggtcatctgaaggctcccagggtgacccacacagaccagaccccagcctgcaccccaggaggctcctgctccccacatacacagagctcatctcagccttacctcgcagatgaggaagactttggtgcccacacaaatgcccatgtgtgccacggcccagacagcagtgttcatgcctgcgagaggtcagggcaagcctatcagtcccatgctgagatgcgaggccctggacgcctccccacctcagagggtgaaggggggaggcctggacaccctctccatctcaaagggcagggggtgaggggaaggtctggcaggggagggatcttgtctctcatgttcactactgtccacaacctccagcacaatgctgggtatatgatagataatatctgttgaatgaataaatgaataaatgcacacagcagcaagctgtgtggctgcttatccaatataactgtatccctgcgcttctcccttcctaacataacttcagtctgcttggcaacatgtcctattcatgaccacgtgtttgccctaagctgttcatagtattccctctttccctgtgctaataactgatttttcaaaaggacccatgacttagttctgaccaaaaccatgagcagaagtctactaggtagggccgggggttctaaaagaggttttcccctttgtaaaaagagaagcaggcactgtcatattatctggattagatctgcttagtacagctgtgcctcacttctcactctgaggagagttaccgtgaggaaaagtgcaacccgatgaagatagctagggtgcgagctggaagaaactgggtcttctatgacattactgaagaactaaattaaccatctctggagcttgcatacctctggatttcttgttatggagcataataaattttcctattattaagccattgtgagttgcatcttttgttacttacagccaaaggcatttgaacgatagagactatggcatacactgtcccttagtcctggtggctgccactggcctgtagaatagagccacggcttttatccaccagatatactgtaggtaaacatgaattaatgaattagttttttctttacttcattcatacacccaacaaacttcattgaaaacttatgtgtgcgggcactgcactaggaggagagatcagaaaggcaagctgccaaccccgaagaagctcagagtccagtgggaggaagacttatcaacagagaatgacaatctagcatggacacattacaacagaggcatgcagaggtgccacagcagcggcgaagagcagcagggacatggcttgaaagaggacaggcaggagggtagctaagttggtttcacaagaggttgtgtctgagctgagtcttgaatgaaaagcaggagacgcccaggaggaccagctagccaagagtctctcaggcagcaggaacaacaatatcccacatcgcagagtaggcaagaccactttttacaatgggccaggcactgtgctaagtgattacacagacactgcgccctcagatccttaacaatatgcacacaaggtaaatatggttatcccattttataatatggaaacggaggcttcaaagggtcaaggaacttgtccaaggtcacatagccagaaagtggcagagccaggctttgaacctagatcattcagagcccacattctgtttaccaccctagcactcctcctacactagtggaccctgttagggaggtgcagtctgtagagcaacccagtgtcctgcccataaaagaaagcacacctccgtaggcaggtgagagaagagactgagcacacaggtaggaaaaggtgtactctgagagggctagtgtttaggtgggtgggcaatggagagagcaggcagaaaagagagaatgtgggtggtctgaaaacacccgtttctcttctgttctgtttattttaacttgaatggctttactcagtgtcaccatcttctaacctttctccttcaaatcactcttacagttaaattagcctgaaaatttaccagcccacaaatttttgttaaccagcctgccacaaatattatacagatagcagaataaataaaattcattggtagttgctactagcctccctgaaatggtaactggccccgggcccacagggactcagctttgagaagactgccttaaataatgaacaggcagatgaaacaaacagtcagtctctgggcactgcatggcactgcaagttggcaccccaggtcctgcagacaccctcggtttgcaggctgtctttttcatgaaacaaagggggtatcacagacacccatcatcaccataaaataatggcaccagctaatttcctgaggcttcaagctcagcagggaaggatataatattgcaagccagcagaagccaagcaagtggtgatacagtagttctgttttacattacattaaatgttactatttctgaagggaatatctgcggagcactggtgtaacccatagcaaccagctaataaattgtaacttacactggctcagcttattgtaggggtggagaacagcaagaaaaaaacgactaaaaaaaaaggcaaatgctggcaaaaatgccacatttttttccctcttactacctcctctacacacacacacaaacatgcatacacacacacacacatacacacacacacaccacaaatacaggctgcatcagcattctctagcaaaattacttaaggtgaagtgggacaattagcagtcaggattttagaattcttgaccttcttgttgatctatacatacaatgtctcttttaaagctcagaagttgtactttaagtgttgccagcactgggccctgccctccaccagcgtgacccttggcatcattttgcagcctgtattgaggatgacagtcctctgcatccagcctgcacrtggaactaagcctaagccatttagttcactgtttttccttctgtctacaaatagctcatgcctaattgcccccctacttcaaattcacagcagggtggtgagcctggctctctgctacattgagcctactctttgacctcaaccatgatagattccttccatccattaattcttgttccctgagccattcagtcttttacacattcaatcagtctctctgaagtgtgggcattggatgtgtatttacagggaattattcatggggcactttgtggccttcagacagtatgttcatctatttgggttgattgcacatgcacacctactatctgtccatgtgaatagtgctaaacttaatgaaagtgccctgtatcctgaaatgcacaccacttagccaccaagggggaagtgaccagcactcagagcacctgagtaagcgttactgggcatcttccttctgtttagccatctctgaactgtgtacagaagaggagagccagggagtccatcaagacttagacaacaggggctcttcctgtctcttccccgaggacacaagtgagggacttagaatcaagcacccatgatcaagaaccatctcgggcatttgctagctgagtgtcatttggcaaaatcattttacttctggggactttgtttcctcatctgcaatgtgagaacattgagagtatcagttaggatgcacttggctgcaggaaacagaaaacccaactcacagtgctttaaaaaggagagaaatagagtttctcatgtgacagtggatagggcaggctggagcctcagtttctatttctctatgcttctcttttcagctggttcctttcatccccatgttctctaccccagagcttgtcttaccactgcagtgacactgtttgggaagagattgcctgttggtctctccacctagatctgatcccttcattcatttatgaaagccctggcttctggaccagtggctggcatgtggtctggatgaaaggatgggtgaatgaacaagtgaatgattctaagcagtcttacttcttggacaatgaaaaggaaatttggggaaaatcaaaagctgcaacatgtgcaaaaatgctctataaactgtaaaatgctactagacattaggaartgttatgattattaacgattacaatcatgaatcttcatgctatgagagcagcctcttggatgctcctgtcagccataagcacaccatactggcagtggggtttttgatgagacaatggaagaaagatggtttttccaggaaaaatagatgacttttgcccctaaaaacagttttaacatccacagtgtgactattaattacaaaggtcaaaaggtatctttacaatggagagatctgatggatatctccttaa

SEQ ID NO: 95841 - DNA, 240825 bp, Homo sapiens
  misc_feature (1)...(240825): n = A,T,C or G
cagctggattctcataactgcttctgcattcaatctgttgtgatttgttgtttggttggaatatgtgaagaaaatccaacctcaggcacatctgtagttggaaatggaggcgtgttttaatagtcttttctgataattgtggatattccctttgatgctacaccaaactctgcaagtggccatttcttaaagcttatttgcggtgtggaatctgaaaccatatcagtaaacttttcttactttgttgcattaaaatccattgacctgtctttcattttggatctttcttactcatgtatcatttgggaaatactgattcatggaattaaatgttagcacattttataataccattagaaaaaaattacatttgttgaaatcagcggtcatctcttgaaaagtcttcttcccctccagctttattgagatataattggtatacaaaaacctgcatataatcaatgtatagaatttgttgagtttggacaaatgtatacactcctgtatttggcattataaaatgtgctaacatttatttccatgagccagtattttccaaatcatgcatgaataagaaagatccaaaatgaaagaaagaccaatggatttaaataccacaaagtgagaaacattcactcatatggctccatattccacattgcaaataaactttatattacatttaccatctccacaatccaggtgataaacgtgtccatcacctccaaagtttccttgtgtctttgtgttttatttttattttgtgtattaaaaacacttaacatgagatctaccctctacaaatttttaaggacacaataccgtcttattaaccgtctgcatattgggaaagctgtcacactcttggtggcagatacaatttttccaagtatctaatttttgtttgaaggcttgacttttatcattggcaacaaataggtcagttattatttttttttgaagcaacaggctaattttgcgtttgagaaagtgtgtgccaaatacccaactttaaatactaatacttttagtttttatttcatgtaaaaatgatattctataaacaaaaactgctagttcagcttgttgatcaaacggttggcataaattcttttccttcaggcaacctccatacttcagtatgccgcacagctccttcatgtgaactttcctatttcagcacaaagaatattaaaaaggtcaaaagggcacatactcaggggttgagatttcatgcaattgctaatgttcactgtttcatcaaggatatttttatatgaaaccgtcctttttttttcccactgtgagttcgcagtggtcatgaggacctatactggtggtgccactgtcttgatttgtgctaaggggccagcaattttatacacccttgctttgatcatcagtgcttcctgtcagcctatgaaagttgtgaatgacctgtttgcattattataatgataattttgatgtcatggacgtcctgaaaggtgcctgaggacccccagggtgtcttggagcactttgagaacagctggtgccagttcagttgaaagtgggctcctcacagtgatctgtctcctctgaggttgctcaactgcatccagcttcttctttgcttattactcctaaagctgtcattttagaagcagggaccagttacttcttggctcagctgtgctgtagttttccaagtgaaaggaagtttagtaacgctaggaaagaaatttttatttttttattttttattattatttttttttgaggtggagtctcgctctgttgcccaggctggagtacagtggcgtgatctcggctcactgcaagctctgcctcccgggttcacgccattctcctgcctcagcctcctgagtagctgggaccacaggcgaccaccaccatgcctggctaattttttctgtatttttagtagagacgaggtttcactgtgttaggcaaaatggtctcgaactcctgaccttgtgatccgcccacctcggcctcccaaagtactgggattacaggcatgagccaccatcccgggcgaaagaaaatatttttgagataggcaactcctgacctgtacaaagttgtacattttgttgtcttacacaataaataagcacatccataaacatgcttgtacttgatagactttcctcatcttttaagatgaagataatcacaaagagaacatgaagaaagttatgttcatttatcaaaaagtacttgtttggttatcataattaaataaaaaaaaaaacaggctaccacctgttgtaatgctttttgtttaatgaatggtttaacatgttcttttgttcttttaatgcctgtaaatagtaatcagatcttgatttgattcagtttctattttttttggcaaaactacttcgtaggtggtggcctgtacttctcaccccagtcaggtaatattggttgtctcactttttgtagtgttcatgaccattgataaccattgcctagatccattattttatcaagggtttgcaaaatggtgatatttttattgttttcctgttttagttattagaatatttttatgaagagaaacttcccctcatcaactctttgagatctagttagtacagaaaaggtaggttggctgggcacagtggctcacacctgtaatcctagcactttgggaggccgaggtggacggatcatcttaggccgggagttggagaccagcctgaccaacacagagaaaccccgtctctactaaaaatacaaaattagctgggtgtggtggcgtgttgcctgtaatcccagttactggggaggctgaggcaggagaatcattttaacccaggaggtggaggttgcagtgagccaagattgcgccattgcactccagcctgggcaacaagagcgaaacttcatctcaaaaaaagaaaaggtaggttaaatgcctgattcttttttgtttttgtttttaacatcagttttcaatattatgagctggtctcttagattagtcccttagaacaggactgttcaggttgtgtaaattaaattggtctctacagcatttttgttggaaacaccaagctaaattgtctggtttttagaagcaaatctaaaggaaactattaatagaaaagtcattttgttctattctgaaagtagcttaattcacttgaaataaaaaaataatggctgagacatcttggggctgttaaatgggaataaaaaaattaaaacacttgttcttgtctttagaatgatgtattcattgcatgtcattatccttttatgtatcttatattgtattctgagatcagattcaaaaatgtataaagcatccttgccttcaaggttcataatagagtaagtgaaaagttgacctctgttcttgttacattgatttgttacaatcattccatgggtggaatgcaaacaaaagttctatttactccaatattccccccactttaaaattcataattttgagaaatgtctgatagacaataagataaagttttcttcggaaaaaatggaagcagtcagtgaaacctattatgtagagggggcagtcagatgagactgaagaggtcctattggaattagggtgagaggagaaaggaagggaaggcaactttcttcagtcttcagctgcagacttcactggcttcttcctgctaatgctgcctgtgacttgaaacaggtcctcctgcttcaggccagacctgtttttaagctgctgctccctccctgaattccttctcatgatttgagtgattactgaatacacaagacttggtgcctagacaacagaagattatataaatgtctgtgtacatttgtgtacccctcctgggaaccagttaacagctgtccttgatcagcagggatcttggtgacactggtttttcctgtgtgcttcctttcatgtgcatttcagagtggtatcctcagtaaagtactttacttaatcattggtgttcataccaactattaatctcaccaccaagatctgttcagttgttttcagttcagtgtcttacacttaataaatgatttcagttgttttcagttcagtgtcttacacttaataaatgataactaaagtgattttgacttggcttctgttatcctgggtgcttctaatttccagatgggtctgaaactgggtatttaaatttagtcttatttttgcatatggagctaaaagtatcctttgggacaggctgtgtatgatatggcaagtctgcttatcaaaatagacattttcctgtctaataacaattttggatggaaaaaaagctttgggggctgggcgtgacggctcacccctgtaatcccagcattttgggaggccgaggtgggtgaatcacttgaggtcaggagtttgagaccagcctggccaacatggagaaacctcgtctctactaaaaatacaaaaattagctgggcgtggtggcgggcgcctgtaatcccagctacttgggaggctgaggcaggagaatagcttgaacccaggaggcagaggctgcagtgagctgagattgcgccactgcactccagcctgagtggaagagtgagactctgtctcacaaaaaacaaaagctttggaatgttttaatagagtggtatgaacttggtgtttacagattaagagcggtcatttcttggttctttacagtatgccaggtgctgtgttatgcaaaccctccctagatgtccatgcttaattcagctctttgagtattccatttacatttacaagtagaaaaatggagtcagggagaagttaggtaatttgcctttggggtcatataactaggaactggtagagccaggattcaaacccaggttacccattctcctatacatcagagaccagtgtgtaagaactgtaggatttgaattcatattggaaatttcctcccctttatggatctttaatctttctttctttggctccttcacataatttggataagcacaagtttcacctattttggccagtgccttaagttactccaccaacgtgcacctcttcccaggagaagactgggtcacattgaaaagtagcccactgcaggcatgacattgttatgaaattttatgtttcatgtaaaagattaaaagttactttccactgtgcgcaactgacacaccagaaaaaggtatctttttttaatgcctacccctatccacacaccgtacctcaggttgagacacaggctatagaactttccagtcatgtcataatcatatatggagttcagttaattcactatgttgttgttgtgggggtcaggttgggaggaggtcaccgacacagaacaagcaggcaatagcgaggggttgaactgaggagtaacacagatccgaacagtgtaagggagaagatttgatgactggagatggggagcttagttcctccatttctggtttcttcttggtttctgccactgtttttctttacgctcctgtcctttaattgtgggagtgtcttcagtccttttcccacttactcacccccaccgccccrattgtgcgtttgcccattgtcttggtttcagctctcatttctgtctgagtggcttctaaactgcctgtggctttaatgagctccagttcagtgaatccacctgagccctaatttgctgtagcaaatttgcagttgctcagtggctatatcctggatatttgaatgtctcagagtgagtacgtttgattttaaccgctcttcctccaaagccagctgtaagcatttttaagtggtacacaaattgataggaagagaacattcccagatccactgtagatgaggctcaggttcctattttatcagccaaggttgctgaactgccctggaagcgggcagccacatttgctggaaaagagacaatatactgaggtgtagttttctctggccccttggtgccctgtgaggcacacagctgtctgtgataatgtcagagattacatcacagtgccaatggaactaacaggaaccacctgtgcacttccttttacaggaatgttcataaacagcaggttctcctaggctttgaacaaaatttagcttctccaaggccaaaagcctcattgtgaagagaaagaaaggtgggtgttcttcttaacgatgactctgcttgtagccttccagtgtcctgcaacgctggtttccacagctgtcttccttgcttaattggtgtacactgccctcggcatgcaactgaaaacgttagggccatacgtcctaatggttaagaatgtggaccgtaaaactagacatgttggcttctaaattccagccctgcttattgctggttttatgaatttagacaagttatttattctctccaaacctccattttcttaactgaaacaggctaattagagtacctaccacaaaagttggtagtgagaattaaatccgataacacattagaagtatttagtgcagtgcctggcacataccaaaggtcagtaaatgctaattgctattattaattaacagtattgttggtaaataccctaaaaaagctgtttttattttttctgtctctgctatctggtcaataacctgatattgtcatctcttcctactcatagaatctcatgttgtcatttgtctctctgagttactgctgctaccttctttgagcagatactcattaccacttcattgtgtgtacagaatgttggtacagaagtcatcttcctttttagaaatgaccattaggcctggtgcagtggctcacgcctgtaatcccagcactttgggaggccgaggtgggtggatcacttgagatcaggagtttgagaccagcctggccaatgtggcaaaactccatctctactaaaaatacaaaaaatacaaaaatttgccaggtgtagtggcgtgcgctggtaatcccagctacttgggggtctgaggcaggagaattgcttgaacctgggaggcagaggttgcagtgagcagagattgcaccactgcattccagccccggtgacagagtgagaccctgtctcaaaaaaaagaaagaaaaaaaaagaagaaatgaccatttattctttggatctactctaccacactgagyctaaattactcagtttgcctttcaaagcctgtcatattgaggcctgtatatggtattttccattactcttgtttttcttttacataccctccactctagtcagacacaggaatgtgtacaaggcatgcatttttctttctctttttgtctaaattggcaccctgtattgctttgccaggcacatgcccatttgtctctcatgggacagttttgaccctgttatgtggaggtcgcatgtgacctttgtctggcctgcgctttcccagggtctgagatgatcagggtcttggctgttgcacctcctctaggctgcgccctagcctgcctttaggagtctagattctgggaaactttattactctgttgctatttattaatctggagtcaagagtactagaaatcacaccattttttttatgcctaagccctgttaaaaggaattctgttcctgaaatttggactgcatatgacatcactataccgtcaggcccctgtatgcatgggttctgcatcagggaattcaaccaactgcagataaaaaatactaacaaaaaaatgaatggttctttctgtactgaatatgtccaggctttttttctgtcatgattccccaaacaatataacaactatttacatagcatttgcattgtattaggtattgtaagtaatctagagatgatttaaagtgtgcaggaggatatgcacaggttatttgcaaacactgggttattttatatcaggggcttgagaatcagtaggttttggtatcgggagacttttcgcccacatatacagaggaacgactgtataacttctttatatcgtattgttcctaaaacaaatctagagcaggtacacagtaatgttccctttatttttgtcctgttaggtatagcagtcttggcagttgctgaactgaattcctggctggtaagaagtgtagtcaaatatgaatgagcatgcattcatccttgttctctgtaatggctcattgtcctggtttaccagtggtggcttgggcacattagggaggcagagaccttcctaagtggttgccccattcagatagcctcatctcacacatcaagttcttaccttggctcatgacagtcataataattctaagggatcattcagccacagtttagacttgatttttcttgtgtttgatggtgggaacattttaagactaagaaattgagtggaagaaaaattaatagacgtgtctttgaaggtaggaattccgtccttaaacttacatccctgatgcctgtgcggaataagtgatattgaaagaatgcatggagttctttttttttttttttgagacagcgtctcgctctgtcacccaggttggagtgcagtgacgcaatctcagctcactgcaacctccacatcctgggttcaagtgattctactgcctcggcctcctgagttgctgggattataggcatgtgccaccatgcccagctaatttttgtattttagtagagatggggtttcgccatcctgacctcaggtgatccacccgcctcggcctcccaaagtgatgggattacaggcatgagccactgcgcctgtccgaaattcttaaagagcatgctgtgcatttctgtagtgagccaatgacaaacccgaaagaccaatcagagattcacctcttagaaggaaaaagatccactaacctgcagaacgtctctatcggtgacttgaggaaggacttggaaagggaacagggagaattaagggttaggaaggaaggcatggatttatttgggagaacttttagtagcttcgtccttctgaatcttcctcttagcttccttaggagatactgagccttagtgcccttgcctagttgctgccactggagaacttgcccgtagctcaggcccaccctgtagattcactctgggagatcaaaccagcatttagatctgctaattatgccatttctatttcaagaaatacgttgagtccaaaatagagattgactgcttgcttcaccctgttcaccctggagttattcaggcagaatatgtcagatatgtttcatgtgatatcttcattaggcaagagatatggatccttttctttccttctttttttaatttgggtaacatttcagaaataatgaatggcaaagagaacgcaataaatgacctttacctccattaacattttggtgttttttttttttcagattaaaaaaaatggaataaatgaaatgttacggataacgtttgaaatatactttgttcccctttccagttttatttccctctcttctcagaagtagttaatatgaatttgtatatatccttttatctttttctaaatttacttttactatatatgaatatttccttaaggacctatacagtgttacatgttcattaacataaatgatacactgtgtgtttcattctgttacttgcttttaaaaatctatcattttgataatatctagccatgatgatatagagaccagatgacattttagttttttgtggtgtcttcaggtgttttctgtaagtacctggttgctcatgtaaatccatcagtacctctaacatttcctaaaaatctttgtttgtatgccttaaattgattaggaatttaaaaatggataccaccagtaagtcgaaagtctgatgtttggtggaaacttccatatgcaatttagcaggctgtctcaatattttgtgttccaaaaagatgctgcgaagataatgcagtgggtatggaatcgtttgcaaaggacttgagtaggtggcagggagtttttgacttgtactaacatacataggagtgctgttgctagggccactttgggaacttgttattgtgtgggaaagtgttatgctattaaaagctttatttttctttttttggtaacagtgttagttttctatattaaaacaatattctctttggtttaagaaatatgcatggatataaaattgttatttataatattaatctggccctgttcttctaaccaagctttggtctcattgccctggcagcctgttggacaatttcacgtggatagctcttcatgtcactcaaaagatcaaaaatggaaaaatacgtccactttttcatggattccttttctgtttagggtaccattattctttttgtatctaagatttggaaccgtggacttaccttcgaatcccaatacctctttaatttttcactttcagacctgctcttttcccctttgacattctcttgtgcgataatctcttgtattctaatctcatcactatcattctagtctaattatgctcacttctgacctagattactacagctgctgctttgctaagtatatatgcagccttcggtttaccccgtaccctgttattaggttttaaagctttccttgcataacatcatgtttgcagaggacttctttgtggacttgtaaaggctctgaggttgctatattgaaaccccagttctgccaactgtatgaccttaaatatgttataaatcaagcctatccaacctgcggcccatgggccgcatgcagcccaggacggctttgaatgtggcccaacacaaattcctaaactttcttaaaacattaggagatcgtttttgtgattttaattttttaaaaaatttatttttttaattaatttttttttttttgctcgtcagctatcattagtattagtgtactttatgtgtggctgaagacaattattcttctactgtggcccaggaaagccaaaagattggactcagttccctcataagtaaactgagacagtagtaatggtatttagatgatagggttgtagtaggattgattgattgattgatttggagacaggatcttgctgtgtctcccaggtagaagtacagtgacactgtcacggcttactgcagccttgacctcccaggctcaagctatcctcagcctcctgagtagctgggagcacagacgtgtgtcaccaaaccaggctaatgaatttttttttttgtagaggcagcatctcactatgttgtccaagctggtctcaaactcctgggctcaagtgatcttcctgctttggcttcccaaagtgctgggattataggcaagagccaccacacctggcctgtagaaggttttaaatcagagaatatgtgtcaagtcctatagctggcacagtcaaacgatagggctattattcctaatcctatcaagtcttaatccctttacccagatcccattgttcttcacattgtgctgttctcaaaatattcagctttaaacttttccaaacataaacctgttctgtgatcagatcagtgactttgtcctttgattcttctcccttcatatcaaacctacgtgtgcatgacttgcgctcctgaaaacaaacgcacccatgtgtgatgcctccctagtttttcatctgtagtgtcttctgttttgtttacattctattgatcctttagtaatccgactcaaagactcttacagtgatatagtgttctgtttgtctttatgtaatttcatcttgtttgtttgctaccttgtatrtagaagctatttctcatctcagctgtaaatcccatctgggctggactatattagattactttggtagcctaaccaatgctaaaatttattaatgtcttcataatagcttgctacttggtaatgtttatacttgttgtaaaaagcatgtgacaaggccaggcacggtggctcatgcctgtaatcccagcactctgggaggccgaggcgggtggatcacctgaggtcaggagttcgagaccagtctggccaatatggtgaaaccccgtctctactaaaaatacaaaaattagctgggtgtggtggtgggcgcctgtaatcccagctacttgggaggctgaggcaggagaatcgcttgaacccgggaggtggagtttgcagtgagctgagatcatgccactgcactccagcctggacaacagagcaagactccatctcaaaaaaaaaaaaaaaaaagtatgtgatggcctttttggtcaagaggatgggtgagtattcatctttattgcaracctactatgtgctaggttctccaagaggtataatgattatgagatacataaggtttctgcacagatacacacatatccacaattttttaacttaaagattgctctttaaaattgctgtgtaaccagtgagttggagacctatcataatggctctgtcgtgagattggttgggaggttgttcaggtgtttgagaatagtggcttggactggcatgttggtggtaatgcagatgtagggaagaagactgattcaagaaatattaggaaggggttgggcatggtggctcaagcctgtactcccagcattttgggaggccgaggcaggtggatcccttgaggtcaggagtttgagaccagcctggccaacactgtgaaatgtcttctttactaaaaatataaaaattagccaggcgtggtggtgcgtgcctgtaatcccagctactcgggaggctgaggcaggagaattgcttgagcccaggaggcggaggttgcagtgaacggagattgcgccattgcactccagcctgggtgacagagcgagactctgtatgaaaaaaaaaaaaaagaaatattaggaaggtgacaggacacagtgattattggatgtaagaggtaagggagagataggactcaacagcacatctaagatttctgccttgggcatctaggtgaatggtcatgccgttcatgtagaagagggtatccggcagaagagcacgtcttggggaggtagtggaaagacatgttcattttcaaacatgttgtgtttgagatgcctacacattaagtgaagatgacacatggttatatgttgggtctagcttagggacagagaactggagatgtcagcttaaaggtgataattgcagccaaatttcttgttctttagtggcagcattttcaggttcaacaatgccttttactaaatctggactatggacatttaagccgatttcatcaagatgtattgaattctgattatagtatttgaatgtactgtgttaagctctgggcagatacaaaggtgaatactgtctagtttccatcttgagaccttagaatctaaggataaaattgaactaaagcaaattaaatgtgactagaaagtcatataatgagagtagcttatttttgctcattatttgtgaaattgatggcatataaaaaaaagccagaggaagggatggtgatgaagagtttattttcagaggcatttagrttttttaacctttctgtagcaggaagtagagaggaagtcatccaggcagcctcctatgtagtccagggtttgagctgtgctatactttagtctgtgtagtgtaggcactgtgtaaacactgggtggatggatatgattgccctataaatctttttcatttgttttgttggttctgggagccaaagaatcttctaatttattagagggctatcrgaaaattggtaaattttgtgaaactatattatttattttgtttctgtgatgttaatgttgtgtgaaattcttttgattgttgaagaatatgggcagagtttagggagctttgataactataaatgtaatattttaaaaaaattttggccgggcgcggtggcttatgcctgtaatcccagcactttgggaggccgaggtgggcggatcacgaggtcaggagcttgagaccatcctggctccggtgaaacccygtctctacyaaaaatacaaaaaattagccgggcgtggtggctggctcctatagtcccagctactcgggaggctgaggcaggagaatggcatgaacctgggaggcagagcttgcagtgagccgagactgcgccactgcactccagcctgggtgacagagtgagactccatctcaaaaaaaaaaaaaaaaaaagaaaaamattttattttacagagatggggtatcatgatggtcttgaacccctggactcaagcaatctgcttgccttggcctctcaaagtgctgggattataggcataagccaccgtgcccagcctttgtttgttttgttttagagatggtatctrtgttacccaggctggactcgaactcctgggctcaagcaatcctttcaactcagcctcctgagtagctggggctacaagtgtgcaccaccatgcctgccttgtagtattttctaatcaacattctgagatacatgcagctttgattatttatacagggataagaataaaaatctgggaggtctagtgaatgcagaacttgacattgttaatgcagaataattgcgttctkcaaagaagaggaaattctttcatcgtgtttgcattttgtgatagtcctcttgatgcaatttgccttaaagtagcagaagacttaaattccttgcttttatagtctctgaatgctgctcttaaacatgaaggtagatgtgggtgagtaagctggaatgtgagagtgggtagaatgttctcagttcattgaggtaactcttctgtaggagaggctacgccgagcaattgcttatgtctgtctccacttaccttgtaacggcaccaataaagaggacacctaggaaatcttgacaaaacaccttgatctgaatgcctttaatcttttgtaggctgtgttctttttctagatagaattcttttgtaattgtaccataagatatggaaaagacttcctggttaatttagggcagattgacttgtagtctcttttagatgattccagattgcttttgaactgttaatactggctaatactgtttatggtttaaaataacattttggggctgggtgtggtggctcacgcctgtaatcccagaactttgggaggccgaggtgggtggatcacttgaggttaggagttcgagaccagcctggccaacatggtgaaaccccatctctactaaaaatacaaaaaattagcccagtgtggtggtgtgtgcctgtaatcccagctactggggaggctgaggcaggagaatcgcttgaacccaggagtggaagttgcattgagctgagatcgcgccactacactacagcctggctgacaaagtgagactccatctcaaaaacaaacaaacaaacaaaaaaaacaaaccattttgggttgttttacttggtctataataaaatcattattcttcataggaagtagtaacaggtgagtaagacttaataagtaagtgtattaaatttaaaaaatgactccaacatctccaggcatcagtatccacatatacttttcccctcctgttccatttctttttttttaaactaagagtttatatacatttttttaaaaatcaacagtgtatataaaattaagatccgagcaaatctttatgaaaactcagttaatgaaaaggtgacgtttagttgactgagtcattaactatatctgttgattattcattagcaattgctactggaatgaaattactttctagagatgtttctagccattaaatgaaaagccccaatgaaaagcacttcttttcattatttgagggtctatcaataccttaatgaattacctctatttattattttatatacttatgtctataactatatatgcacacacaatatatgtacagatataagtaaaactattaaaagtaaaatatgtgccaaaaagtgcacatttaagtgtagagcttgatgaattttcacaaattggacacacctgtgtaaatagcacattttggtatatattttacaaataattttccctggttttatgtaacaggaagaaactttgatctaagtcacgaatctaaaagtgcrttttagtttggctgaagatgggtgaatagtcttacttcaggtatttttcaggcttaggtgctcatggtcaaactatatggactagaatgttgggtcttgatcattcattagtctgcctcattttcagaggagaatattgaaccttgtcttcttcagcttttcagaagctgcagtgagctggctttttattcaaacatgcatccttgtaagtgccccagaatcttttttttgtttgttttttgagacagagtctcgctctgtcacccgggctggagtgcagtggcatggtctcggctcactgcaacctctgcctcccaggttcaagtgattctcctgcctcagcctcccgagtagctgagactccaggcacgtgccaccacgcttggttaattttttgtatttttagtagagacagggtttcactatgttagccaagatggtcttgatctcctgacctcgtgatccacctgcttcagcctcccaaagtgctgggattacaggcgtgagccactgccccaggcctcacagaagaattttaattgcccttagactgcatgttaaggcagctgcatctgtctatatatctatgaatttcaaataggtactctccagacatttcccagggagtacaaacagggctccctacctttcaaaatttatggaaatcttgcttgaaagaagcaatatttagggaggagtgcctgaaggatctgcagttcatacattagacaaggtatttcaaattatgctcctgcatcaagccagattagcaagagaacagtgtctttatgtcatatttgattggcataccaacaagcttttgctgaatttttagctggtgtgatattagtgggtgttgcaatggctaatactccaaaaatcctgtgatagtattataaatcctgttgtcccagcacttaatgttttttcttctcaagtaaaacaaatgtttttcagagatgtgactgttgtctgactttaaatgaaatattcctttggtttctctgctccttccaaaaagataggcagcacatctgcaaagatggaaagatacattgcaaattttgcctaacttccttttgcctagaaaccatatttgggacctcttgtattgtttcgaattatgcacacaaaccattttgattgatataattcttaaaaaaattaaaacacaccagttgctggtcatgacaaggtacaacagttctgcctgtaattattatgggtctagatcartgtacatcaccagctamttatttagcttactattgtactaaaaagtccaaaaaacaaatggctggggcagtcccactgagagatcccatcatcatttaatgtccctggaggaaaggcaacatgcgctatttcaaagaaccgtggtcttcagaaagagctctcaggcttcaagactcttcaaaaacagcagcctaggcattacagccagaggtttctgatgaactctgatttaataagttccccaaagacagtttaacattttcatgcatttttaatgataaatattttgcttccatttcctactgcatgtttaagaaaacgaggatagagggcgttgatgttgaacaggcgctgcagatagaactgaagtaggcacacgtgcctttccccacccagcaatagatgtagattgcgccccctccccagctcccctcctcccccccccccttttttttttttaaagagatagtcttgttatgttgcccaggctggtctggaattcctgcgctcaagtgatcctcctgcctctgtctgccaagaaactgggactacaggtgggtgccactgccctggcttcctcctactccccttcaattaaaacaatagttttaaacatgatttaaagcttctgaactgctgggctgctgtgtattgtgattataaccatgtcaatgtattaggcattagaggagaaccactgtgatgttttgctgaatgaaagcatagtcagcaattctctctgctgagatttgccttgaccttagctttatgcctgtgaaaatcttcccgttccgtaaggactgtgtcaaacacctcatcatccttcaagcttgtcactcttttaacgcgccatcttagtctcgtggcatttaccagcctacaagtcattgcatgtgaagccgtaatgcggtcttgggaatcctgtggtttggggatacccagaggcctaggggattctgggactggctgcggccatgttgctgtttttaagagaaccagtaaaaccaggtctagactccacattccctaactccaactcaggtctctttctgtcctgatatcctgtctttgcagaataccccgatcttaagcactgtctgttcatcaaagtttgaaggaaaatgatctaatcttatgtactttgaagtactacttattaattttatgtttaaaatattcaaacattgtacttgggaggctgaggcaagaggatcgcttgaggccaggaattagagaccagcctagacaacattgtgaaaccccatctctaaaaaaatttaaaaaaattagctgggtgtggtggtgcgtgcctctagtcccagctacttgggagactgagctgggaggatcacttgaggccaggagttggaggctgcagtgagctttgatcatgccactgcactccagcctgggtgacagagcaagatctcatctcttaaaaaaaaaaaaaaaaagataaaaacaaatattcaaactgtgaaggtgaagttctccagccaattgaagatttaatgttggtggagatttactttagaatgatgatggattggcttcttttgtggtaatagctgaagagtttgggggcataatcactacccaatttatgcttatgcaaggttggactagattagaagagaattgagttaaaatcgacctcagtttgttgagcattcactgttgtcatcactatctgggcattgaggctatggcattgaatgagctaatttgttctccttttctattctttgctggagcaatggggttaggatagcagggcatgttcctcacctgcctctcccaaaggtcctgcatcaatcagatgagcagggttttagagacgtaaagtatttatatcacactgaatccatggcttcagtcataagtaatcaaaatgtttaaggaagtagaaatagttatgggaaagaaagtccttacttttgagtaaaaggtgtatgtaattacaggtggatttgctgtatatattcatgaatattcctgaaggaagagtagtttcatgagtctataatattagccccattttctttttctttgtttttttttgagacggagtctcggtctgttgcccaggctggagtgcagtggcgcaatcttggctcactgcaagctctgcctcctgggttcatgccattctcctgcctcagcctcccgagtagctggtactacaggtgcctgccaccacgcctgattagccccattttctacaattgcctttttttttttttttgagacagagtctcactccgtcatcgaggctggagtgcagtggtgcattctcggctcactgcaatcttctctgcctctcatgttcaaatgattcttctgcctcagcttcctgagtagctgggattacaggtgtgcaccaccacacccgggtaacttttgtatttttagtagagacggggtttcaccatgttgaccaggctggtctcgaactccttacctcaagtcatccgtgtgccttggcctcccaaagtgctgggattacaggcatgagccaccgcgcctggcccctaattgtctttataataaaaatggtttttaaaaatgtaaaaattaaaattcagatttaaagtggcttacaacgtactctatgatgtaacctttgcctacagttccttctttatcaaaatttctctggctcattttgttccagccacatcttctttagaacatattgggctctttccttcttcccagcctgaattcttcttgtaccttctgccggatgcccttgtctctcacatggcggttccctgccccacagtgattcagggctgagcttaattgcacctgcttagagaaacttcaccttctacccaatatagagtatgcctcctctctactcacatttgttattcttcatttatttaattttattttaatgtaatttttgtttgtttgtttgtttgtttttgttttttgaggcagggtgggtgtacttcaccagcctgggtggagtacagtggtacttcactgctcactgcagcctcgacttcccacgtcccagctatcctcccaccttagcctcccgaatagctgggattacaggcatgcaccagcacgcccggctaatttttgtgtttttggtagagttggagtttcaccgtgttgcccaggctggtctcaaactgctgacctcaagtgatctacctgccacagcctcccaaagtgctggaattacaggtgtgagccatcgtgcctggctcgttattctttcaaatagtattatctacttttcttttaccatgttgatcacattttatacaggttgggtatcccttatctgacatgcttgggaccagaagtgttctggattttattttatttttcttttggaatatttgcattataccagttgctcaagcatccctaatctgaaaatccaaaatctgyaatgctctagtgaccatttcctttgagcatcatgttgataattttggattctggagcattttggatttcagatttttgtattagagatgctcaacctgtggtatttattgcttctttgtttatttatttgactacctgagtgtgttgtcttttttgcttgctagattataagctctgtgaaggtcagggatgtgcctgttttgttcaccacactatacccagcatctaaaggcagcaattgcctcatagtaaatattctaatatttgttaacttactgaatggatccaactaatgcagaggttagcaaatattttttttgtaaaggccagatgcaatgtactaagctttgcaggtccagtggtctctgcttcaaatattccactttgccattgtaacataaaagcagcygtagacaatatataagtgaatgaacttggctgtgtttcaataaaactttatttataggaacagatggtgggccaacttgctgtagtttttaggcccccgaactaacgcatatggcagaacagatggcacacggcataccttagctctttgacatctgtgacaatgttgatgggcctagtgactaaggttttagaggcaacctaagcagatagcacacttggattaaatattaaccagaattagttggaacaagaaacacttattgagcacttactgcatgccagatgcactggaaactagagacataaagttaatgatgctcaaaggctgtggttcttgaagagtttactgactattgagaaacagacaagctaacaattataacatggggacaatgctgattggggtacacatatggtgtcagagggacatagaagagacagcaccatagcttagaaagagcaaggttttaagaaagtgattacaaaaatgaaacaggaaggagataaggaaaccagcatctattgaggaacttctctctgttgtgttatccatgcattcacttttttttcttttttctttttttaaagtcagggtctcactctgtcacccaggctggagtacagtggcatgatcatagctcactgcagcctccaactcctgagttcaagagatccttctgcctcatatgttaactttttctaattcttcatggcaaaactatatgttatgaggacctgaagcgcagaagttgtgggaggtggcagagcttgatgttacaatttgaggaccgtgaaagcatttctctttagaatcaggctcaagttcagatccctgctctacttctttattgacttgggtaaattgttgaacctctaaactgaaaaggcccttgtgggctgggcacagtagctcaagtttgtaattccaccactttgggaggctgaggagggtggatcacttgaggtcaggagttcgagaccagcctgaccaacatggtgaaaacccgtctctactaaaaatacaaaaattagctgggcacggtggtgggcgcctgtaatcccagctactagggaggctgaggcaggagaatcgcttgaactcgggaggcggaggttgcagtgagcctcctgagtactccagcctgggtgacagagtgagaccctgtctccaaaacaaaacaaaacagaacagaaggcccttgtgaaggtcagatgagagagtcttgtaaatcccttagcatgtaagtacttatgcttacctaagtattcaagcaataatgtagtttttttgctcttaaaaatataatttaaacccaggtctggataatcctaaaacccattctttccctttcctctgcacttactctgcttattggatttcattaaaagaaagcacagtttgtgccaacatttattaactcgataaagttaaaaaagctatgatatgtatttcttggttattgaacaatggaacagacacattatcaacactgaataatttatagacattttacactgagaaaccatttgttggaaaaagagtttcaaagtggaatttttttaagatgtaaaggcattttttgggggtggggtggggagacaggatcttatgctgttgcccaagctggagtgcagtggcatgatcttggctcactgcattcttgaccccctggactcaagcaatcctcccacctcagcctcccaagcagctgggactacaggtatgtaccaccatgcctggctaagttttgcattttttgtggagatggggtttcgccaagttccccaggctggtctcgaactcctgagctcaagcagtccccccgccttggcctcccaaagtgttgggattacaagcttgagtcaccatgcccagcgtaaatgcattttgatatgagctgagctcataattctgttcttttaaacattctttatcaattaccccttctcgtttttgcatctttaacctgttgactcaggtctacctgtttttaaaaatatcagcagcaacaacagtaaaagcaatacctctgatgggaactcagggacctatctcttgtctctttttatacataacttcctcaatgggaggtgcatcctgagtactgttctatctcttgaattgattctgcccttgtcctgtctgtctaccctataatctccactaatgaaactggtagagaggatgccttctaattagtatttttatatttctcaatatcaacagcatttggagatgaggactgtgccttcttcctgaaagtctctcttccttggcttctaagatggtactggtgaattaatcttccaagacaccattctgaacatgtcctttttacccaccgccaccataaaatccttaggccagcattggaaatcattctttcattccaacacttaccttttattttatcccaactgtaataaacagtttccttcacatgctctgtgcttcccacttccatatgtttgctcaagctgttgagagatggtggaaattaatgcttgggctcttcagtcagactttctgtctttttctttgatcgtttgagattatattttatttaaaaaaaaaaaaaaagctccctgaggccagggctggtgtctgtgttgcttatctccactctaattttgtgaccaaggcagacaccaggacggtctaatttaaagtgcagccttctcacgtggtggggtttctggtccaccagcgccccatcctgaggatctgtggtctcagggctgggcactagatttcttgcatttttccttatttttttgccagtcattcctggctctgatgctcctctttgtccctgttgctgctctttgccccaatttttagctaaaatgagacttaaaaaaaagagacagggtcttactatgtcacccagtctgtagtgcagtggtgcaatcgtagctcactgtaaccttgaactcctgccatcctcccacctcagcctcccaagtagctgggactgcaggtgagtgccatcctgcctggttaattttcaaaatttttttgtagagacagggtctccctatgttgtccaggctggtctccaactcttggcctcaagcgttcatcctgcctcggcctcccaaagtgctgggattgcaggcatgagccactgtacctggcctagaatggggctttttatttggttcctgaaactgtgcctatctctcaaactttcttttttctggggattgaagctctgcctctggaattgggtatggagctagaacgctttccctacctgactcccaagctgccagacttcccattgctatcttccatctgtgagatttggatactattcctgtgtcttggaaattctggtacctgctgttgcctgcatcaccactaaggttcccacatgtgtcggatgtttcacctggcgccttcagctgcagctcctccgtctgcttctgagctgagatatgccgctcctctctgcccctcccctgccatcctttcctctttgcagatcgtgggccagctccaagatccctccccttcctcctggcttggttggtcacgcttcacagccaaatcctgagaaagggaaacacttcagtgttgattttagaagtcttctgtatatggctcatgagccaatttaatttttcatcacaatctacattgacgggaaaaatgtagctctgtagaacttttaagagccaactggcagtggtggatcaaggtcgggggacacttttggggctttatcccttctgtaataccccacctcctttatttgacatgaacagtttccgtgttctgaatatttatttgcagaactatgcaaacacagcttcaaaccttgtgactttaccctccccaggcccatcaggtcacattcctcatttcttaaattcaagattggctgctaccagatggtagtggccctttcactcagcgtatttagatgaaagcaatttgaatacactaccaccagagaaatttgggttttctttaaaatattttattattgcctctgatttatatgtggtcaggtacttagacacctgagtgcaggtagactcattatgtttctttttaaatgtgagatttatttttattttattttatttttttgaaacggagtctcgctctgttgcccaggctggagtgcggtggtgcgaactcagctcactgcagcctccgcctcctgggttcaagcgattctcgtgcttcagcctcctgagtagctgggattataggcacatgccacctctcctggctaatttttttatttttagtagcgatggggtttcaccatgttggtcaggctcatgcctaactcctgacctcaaatgatctgcccacctcggcctcccaaagtgctgggattacaggcgtgagccactgcgtccggctaaatgtgagatttagcattgtattagtctcctcaagccactcaagtaagagttcctgagctgtgtacatgattggactttagagtctaatgaatgtacaacctgtttagaataggtgcagctttttgtgtaactagcgaatgtttcttaggaaagaaaggatccatagttttcatcagattaaaaaatgtctgtggcttccaaagggccaaaggccatttatactagagtattatttatgacacctgtgtagtaacctaaaatatttgtgacaactttttaaaaggacttgcagttactggcttaatgcattgtgcctctttgggatatactgttagtttcattataaattactagttcagtcaaaaattatattattggctgggcatggtggctcacacctgtaatcccagcactttgggaggccgaggccggtggatcacaaggtcaggagagcgagaccatcctggccaacatggtgaagaaaaaaaaaaaaatatatatatatatatatacatatatatatatatgtatatatatatatatatgtatatatatatatatatgtatatatatatatatatatataatttatttatttatttatttcctttttcttttttttgagacagagtcttgctctgtcgcccaggctggagtgcagtggtgcattctcagctcactgcaacctctggtcccaagttcaagcgattctcctgcctcagcctcctgagtagctgggactacaggtgtgygccaccatgcccggctaattttttgtatttttagtagagatggggtttcaccatgttggccaggctggtcttgamctcttgacctcaagcaatccacccacctcggcctcccaaagtgctgggattacaggtgtgagccataatggggtcttgttatgttgcccaagctggtctcgagctcctgggctcmagcaatcctcctgcctcggcctcccaaagtgttgaggttacagacatgagccattggcacctggccaaaaattataaatggagagatagaaagtgagataaaccggtctctctctcaggatagagaaatgtatttgtgagtatattgtatgatcagtttcttgtactacattggagggtgttctacgtcattgtcattggggtgtgtctgatatccacactctgtgtactctggggtcacctgatggagaaggctgtgctgcctaggtatgtatttggaggtcagcagaagagtggaggtgttgcaaccttggataagtactgtggctttctctgctgtcccacttatgaccacatttaggatagaatggcagggacaatggtttgcctcgcttaaatcttagtggaactatggtgactgcgctggatctggtctttgactcatttcaatataaaaagcactggccagtggagcgcaaagccaccgtgttggtgggaagtatgtttgtgataaacaccatagggttccaccccagtgaatgacttgggcagtctttcgttaagtcatggttcagtgttctgctcaccttgctaggaaggaaagtgttcacagttaattctgtgttttytcacctgtgtgtaggatctacttttgctaacaagcatacatcactgccaaaatggttaattctggaaagagaactacagagacaaagtatataaagagcaatttttcttagttgaaagattaaagataattgattgaattggggacccatctggctttgtgatttgctggagtgacttatgaaaactaattgctttggtaaagaactaggctattaaagaataaattttatagtgtaattttgtaggcaccttacatacttggaaaaaccatttgaattctttctctaacatcaattgggcataaaataaatcaactcacactgagttgaaatgcatcatgtagaaaacagagccttttcactttcactttaaattgtgccagaagaaacatgctatttaaaaaaaatttttttttttttttttttttttttgagatggagtctctctgttacccaagctggagtgcagcagcacaatcttggctcactgcaacctccgcctcctaggttcgagcgattctcctgtctcagcctcttgagtaggtggcactacaggcatgtgccaccatgtctggctaatttttgtatttttagtagagacagggttttgccctgttggtcaggctggtctcattcctgacctcaggtgatccgcccaccttggcctcctaaagtgttgggattacaggcatgagccaccatgcctggccagaaacatactatttggttagaacatagttaaatatagtctctggtattttcatatgttttagatttctttatcttgacaagtgattgaaggaaagaaccatttatagtctgtaggtataaggaagctttgtataactgcttcagatcattaactaatgcatacatatagactaatacataatataatacatagatcatttatagagagccagggagactggaatggatgaattgccactggaaatgattgaatactttttagataattaagcatgtattaattaacaagtagaaagagggatggactcaaatatgtcgatgatgataatgccataaaattattgtaacagtatttataaatagctgctaatatagtgttttctgtgtttttgtttgttttgttaaatatcaatgtttcctaagtatggacatgcagggttatttctgaagtattctaatgaagagtttttgttttaagcactatgcttttcttgttatgggggacagagtgacagactcttgctctgtcacccaggctggagtgcagtggcacaatcatggctcactgcagccttgacttcctggactcaggtgatcctcccacctcagcctcctgagcagttggcattacaggggcacaccaccgtgcctggctaattttttgtatttttttgtagagatgggattttgtcatgttgcccacgctctggcctagaactcctgggctcaagcgattctcccacctcagcctcccaaagtactgggattccaggcatgagccactgcacctgcccatatgcttttattttcatgcatattagaaaacataactaactcatctcctgcctccctgcatccttctcttctctcccctccccctcccctcatctttttctttttctttttgatggagtctctctctgtcacccaggctggagtgcagtggtgcaatctcggctcactgcagtggttcagtcccacctcctgggctcaagtgattctccctcctcagcctcacaagtagctgggactacaggcgtgcaccatgacgcctggctaattttttgtatttttatcagagacagggtttcaccatgttgcccaggctggtctcgaactcttgagctcaagcaatccgctggcctagacctcccaaagtggtgagattactggtgtgagccactgcacctggcctcactgtaggtatttaaaaggagtctaaaataggtatttaaataaaataactctgtgtaagaaaattgttaagtaaaaaagtagttttgtatgtaatgtaaaaattgtgaggctggcatatgaatgatcaaaagtgtgagaactactaatttaggtgactgataaacagctgtttctgtttaaattcattaatatattttagagttaaaaaaaaacctggtggaggatgaatggtggtgggctgtctacattagaggtgcagtttcacctgtaagtttgagtcctgagccttctcattctctgagtaaaagttctgagacatgttacacaaaggctctttcttttttccctttagcagctgtttagtgcagtaataacttggtgttttcacagaaatagggwtttctgtttttccactgtgtggagagctctctctcccactccacaggagtagagacaggagatacactgtgatatctctgattctagcatagtrcctggtggttgctcagtaaatgttctttggatacctgtaattgccatttagtaaaactaataggagtaaaatgtaatatattttatttaaatatatatttaggccaggcgcrgtggctcaagtctgtaatcccagtactttgggaggctgaagtgggcagatcatttgaggtcaggagttgaagaccagcctggtgaacatggtgaaaccctgtttctactaaaaatacaaaaattagccaggtgtggtggggcatgcctgtaatcccagctacttgggaggctgaggcaggggaattgcttgaatctgggaggctgaggtttcagtgagctgagatcatgccactgcactctagcctgggtgacagagtgagactctgtctcaaaaaaaaatttatatatatatatatatatatataatatttaatatgttatttatatcttatcagtcctaagtataataggaaatttactagatagtagtatatataggcaaactgtagacttttggtattaatagcagcaatgcctttttttttttttaacctttcttgtcttcttggtggtctcaccttgactctacttgaaaaggtgacaggagtgtgacgaagtggaaggaacatcgggttctagacttgtgtctgtccccttcttatagaatctgggatgggaaggatggaatggaggtgtaacctaccttagaaggtgtgggttaagtgtgaaataatagctgcataaatactcaatattgtcaagttctgcagatgtgtatgtttatgttatttgtgtactgtaaggtgtcagcacaggactgtaataccttacctagaaatgattatatttactccccgcagaatgtctgcccttttctcattgagaagccaaaacagagccccccattaaacaaaatttaatgttcatgggggtttgtcagaaatgtggagatatcacattgtattgatcaggaattgcatgtagctattacagacatagaacctgttataaaaaagagttacgttcatggaaacaagctttcttttctttttttttttttttattatactttaagttttagggtacatgtgcactttgtgcaggttagttacatgtgtatacatgtgccatgctggtgcgctgcacccactaactcgtcatctagcattaggtatayctcccaatgctatccctcccccctccccccaccccaccacagtccccagagtgtgatattccccttcctgtgtccatgtgatctcattgttcaattcccacctatgagtgagaatatgcggtgtttggttttttgttcttgcgatagtttactgagaatgatgatttccaatttcatccatgtccctacaaaggacatgaacaagctttattttctatgaagatatctgagaaggttttctttgggagttttatataaattctgtgtttaatatcttccttaatatgttggttttcagtttccttatcataattaaagaatataaggaagacatacttgattggtttcaccaagctcagaccttccctcccaggcaccagataaatgatattatttccagttcgtgtcatgacatgaaacgctgaattgcgcttgttgctttttaatactgtgacatctcaactgctgtcattggttttaatctgtgggtgatcttggaaagggataggtttgatgtaggtagcctagaaccttctcagggattgtggaatatgttgaaacttatgctgtttctgagaactatctttctcctttctgtgggtcaggctgacataactcagagcacttgtaatcatgactgtagccaactgtggttacctgcagaggcttagatcaaataggaatttgtctcttcatttactcactcggcatacattgaatgagcatctctgtactgggcatgggggaagatgacttattatttgtcttggttcttaaggaatttatagtctaatggaggagaaagacacacagattctcatataaatggatggcgtacaatgatagattaaataggctttgagacttacagtggaactgtgggccatgattgccatttgaattttaaaaaattaatagaatgtatgatttttctgttcttagttatatacgtaagacttgaataaatactcattgtgaaataagaaaggtagaaagattatagcctaaaaacgagtccaattttatatcccatcctcctccctgtgccacttttcattattattattttttaaaaccattgcctgattgatgaacattttaggtcattacttttttttcctgtctaatgatgcttagtcagtttttttgcacatatatatatttgtttacctgtgtgaattatgtctgcagtgaaattcttagaagtagaatcttggctggagtatttttctgggggtgcatttaatctgttattggaattcatattaatattagaattaataggctttttttttttttttttccctgaaagcaactgaaaatgtatggcaatgtggagttgcagggcagtagtcctaatggtttagctacagcatctgcataggtcttttatatagaaagtgtctgggtagtggtgtttgaccttggtaacttttctctctgccatttgagccgctgctgtcttcatatcctccctatctagaaattccctctccaaagttgttccatattccaaaatttcccttttcacactcctagtatactgttgacctcaggtaggcacagttttgattgtcagagcaaagaaaattaaccatgtatgtctttccagatagtagaattttcagggtattccatgagttccaaaggatgatttgtatgaagtatatttcactaagtataaaggaagtaaaacactcatactatggtctcttccctctcctcttcacctcccagtgcctctctacaaactttttaggataccaytaatgagtacttgacatattcatagttagtccataaacctgagagtgctcctggatcctcataggtatttcattgcactctgtgattggaattttgtttgttaaaattgactaggaaactatatttcagtaacaaatatgtagaattaagaaaaagatgggctgggcacagtggctcatgcctgtaatcccagcactttgggaggctgaggcaggtggataaagaggtcaggagattgagaccatcctggctaacatgttgaaaccctgactctactaaaaattagctgagcatggtggcacgtgcctgtattcccagctacttgggaggctgaggcagaagaatcgcttgaacctaggaggcggaggttgcagtgagccaagatcacgccactgcactccaacctgggtgacagtgagactccgttgcagaaaaaaaaaaaaagaaaaaggtgggccaggcggtggctcacgcctgttatctcagcactttgggtaggctgagggtggatcatttgaggtcaggagtttgacaccagcctagccaacatggtgaaaccccgtctctactaaaaatacaaaaactagtcaggcgtggtggcgggcacctgtaatctcagctactcgggaggctgaggcaggagaatcacttgaacctgggaggcagaggttgcagtgagctgagatagcaccattacactccagcctgggtgacagaaaagatgagttcctatcccttttctttacatttgttttttcaaagtatgtttgcactatgttagagtgagtgcatacatttagagaacaacaggggaaaatgctagaaattcagtaacttctagtttccattttataacaaatgtatttttattattagcttcctactggaatcctactccccaccattatgtcatcattttcacatccacggtctgtagcgattatgtccatgtggggcctcagtagttttccctttaattttgtgcagatttccttactgcataaactcaactgctctcactgaggtcgtcattaagtcctgtgtgtgtttgggcaggccgacttgatttacagccagcactccactgcgggtgagtaagatggcaagtttctccctgtttttcctctcagcccttccyatctagagtgcagataacataattactcagttaaatatcatctgcccaggttttcattttgagataaatctatattgtggttatctgcattatacttaaaacttacaccgaagataattctgttggataggttttaagtaattatcttyagtatttccttttcatttatgatatgaggcatagcaaatcttggattccttgatattaaaatagataagatcaagctgtgaactcaggatgagtcagtactgttttaagagttggatttgccatgcttttggcaaattagtacttcagagcaggagcccagaggtttcaggtaatcccagtcaccaaaatgtttgttacaatataacatcattacttttcacttgggaaccttttattttgttgggcccttttctttcctgttttctttttatagccatttataattcagggattcaggcaaagaaatacagcccttggaccacaagatagttatattcagcaagattttcagaacttgtacagctatgatttttctcagtaatcttggctagtttgtgaaattaatggctttagaaatattctcaaatggtttagaggagagtaaaaagaatcttttgaaacattgtcccattttgttaattcaaggagattatagtgcaattgaatgtaattcccataagaatggatatagcaaaagtatgtctttttttttttttttttttttttttttcttttttgtgagacagactctctctctgtatcccaggctggagtgcagtggtgaaatctcagctcactgcaacctgtgtctcccaggttcaagtgattctcctgcctcagcctccctagtagctgggactgcaggtgcccccgaccatacccggctaatttttgtatctttagtagagacgaggttttgccatgttgaccaggctggtcttgaactcctgagctcaagtgatccacccgccttggcctccgaaaatgctgggattacaggcatgagccaccgtgcctggccaaaagtatgtctttttaataattgagaaatgatgtcttgagcagtcaagtaggaacaattacttggttgtccttgtgtaatgtgcagaaattaaggaagatgatttttcacgaatctacataggacctatcaactataaggaaatatattagtaaacactgtttctacatcctgatgcttgtaggtttccttgatgttgaaatagtgttagcacagatttgttatttttcctctttctgattaatccaaacctggagtgtggccctggttctccggctgcagagaagtcagtccatcttttgtaggctccttttctgttttacatttgtcgggctcactacttgagcttactcagcaacctttaaagctctaaatcctcgttagtcttaaactccccagctcatatttggccggcaactctacttggcatttcagtaatttcccacttgccagctcatcttttaccaagaatcaaaaaccattctgatctttaaaraaatgcagatgaggccgggtatcrtggctcacgcctgtaatcccagcactttgggaagcygaggagggtagatcacgaggtcaggagttcgagaccagcctgtccaacatggtgaaaacccatctctactaaaaatacaaaaattagttgggcatggtggtgcgtgctcatagtcccagctgctcgggaggctgaggaaggagaatcgcttgaaccagggaggcagaagttgcagtgagccaagatagtgccactgcatgccagcctgggtgacacagtgggactccgcccccccctcccaaaaaaaaagaaatgcagatgagaaaagaccctttctaggacacagagaataaacttgcagctgttaaggagtgggaatttctgccacacgtggatgtcagaaatggaagcttttattatcaggagaaatatttgctggttgatgttacttaaataggttcaaatttcaaacagttctaagagcctgttgaatgtccgctatgaagagttgattttgccaagatggaaaaaaaaatctcatctggttgccttttaacgcctctgtatgatgttagatacaggtgtacttcttgccttttcacatattgaagaaaacagtgagagtatctagaaaacgggggacctagatggagagactgaatgcatgagggttartgccagtttcctcatattacaacccaggcttgagcaatatctgattttttaatgcttcacagaaagctaaataaaygcctatgtactgtggtggttccattcttgttcagtaccatcttggcttcctttcaggtaaggaagaaattgagcagtgattgtagcagtgattcccctgtgggggaatgccctactatggaatactctgagtgtgtgacatgtcgccgtttacccaaatccttgaagttaatgagtaaaacggcagaatacaatctagactcatagattctgaattttggaagtgaaattgatcttaagataatgaaatctactatgtttatagtttgatattttttgttatacccctgacatagtactttgctaatcacaggagtttgataagcatttgataactaagcaatgtataagctaagtcacaaaatgaaaagattgattttggcagtaaccgataatttgaggtctgttgtcttgtctcaagtgtagtcactgctgattgttagcacctttctgaaactgcaaaagaaaaactaaaaatggaccaggaattagcgtaggaaagtatagattagaagacccaaagtgaaacaaatggaaaaagtttttttttgttgttgttaagtatacatatattagagatgggggtcattactgtgttgctcaggctggtcttgaattcctggggtcaagtaatcctcccacctcagcctcccaagtatctgggactacaggtgtgtgctatcctgcctggctaaatggcaaaagtgaataaagaggtgccagggaatagaggcctcctgtgttggtgtattgaagtcggaatacctgtgcctgcatcagttctgtgttgatattgtgagtgaagtgaagtagtaactctgcaatgaagatactttctttaaaaacttgaacacttttctgttatattttacagtagattgattggctcattgttgcatacttgtatgattatttcttagggtgtattcctacaagctattgttggttcagagggtataatcacaattagaatttttattttattttatttttttaatttttttttgagacagggccttgttctgtcacttaggctggaatgcaatggtgcgatctcggctcactgtaacctccgcctcccgggttcaagcaattatcctgcctcagcctcccgagtagctgggactacaggcatgtaccacacctggctaatttttgtatttttagtagagatggggtttcaccatgttggccaggctggtctcaaactcctgacctcaagtgatctgcccacctcggcctcccgaagtgctggtgttacaggcttgagccgctgtgcccaaccagaattttgatgtattcttatatggttctttcttaaatcaaaaatatgttatttgttcagattaagacaatgttgggtgtttatttttagtttcacattccttacttattagaaatatattttttatagctttaacacatcagctaaagcttgtgaaagttgcctttgttaacatgaattccattttccttttaaaaattaaatcatggcaccctctactgaatttgaaaggaattgctgaatagtcatatgcaggtttgaaaaagactgtatgactttatagattagactttgttgacacctatacttactattatgatcctttttgctcacaggctcctcattaggcagtgtggtaacatacatgtaattaaacctatattttgaagcaggcagaggaactagagtgatcaaattcaaagaagcatgaaataacacagtgtgttcagggttgtagttttatagaaaacttgagagagggtgttggtgtgatttttgcaaagaaagcaataagaaaggaccaagagcatgtctcaatttaaggaatttaaactttatcatgaaagtgcggttgaatcatcagctcgtttatttagagtagtcaagtgatcacgtaaggatctttgaaagatgatgctggcagcctgtgtaggatgggttggaggtgggaacagaccaatttgaggattactgtgtttgccgatgggcttattagggttctcagaaggcacataattctgggatataagaggctgggagatgtggaagttctttttttcccctaaaaaagttttagcataaaaatttcaagatatatagaaaagtagaaagaatagtacaatgaatacccatatgtccatcttagatccagcaacagatgacatttggccatatgttctctctccctctcctccgcctctctgctgaagtatttttgcataaattacagacaccattacttgacacccctaaatactctattgagcatctctccaaaacaaaggatgttaggagagagatgtttagggaaataaaatcaggaaagttagaatttggtggtatagataatgggttctgttacatccaataggagaaccacaaaggcttgcttttactgttagtaatttgtggttatataatagtttctttctacagtttttttttttttgagactttcaagagatggatatatagtaaatgctattacattttaaatcaaaatgttgaaaaggacacttttttcatcaacaaaaatttcaaatgtgcacaaaagttgaagaggacatcattcttggctaaaacaatggcccatgctagacttctccatgcgagaagagaagtggagccattccagagaggagtgggctaggctcctcccaccaggggaaggtgcaggctctcttatcatatcagaagcccaggtcagcagaagtttgtgtgagaaaggcacgcagccagcacaagtgtgacccaaacccagtgaaatggtgagagtgggcagccggcaagctgactggcactagcagagtctgcttactcggggaaaagggagcacgagatgtcaaggggactgggcacatatgaccttttttggcggtgtacaaagtctctctctgttgcccaggctgtattgcagtggatctcagctcactacaccctctgcctcccaggttcaagcaattctcctgcctcagcctctcgaatagctgggactacaagcgtgtgccaccatgcccggctaatttttgtatttttagtagagatggggtttcgccatgttggtcaggctggtcttgaactcctgacctcatgtgatccccccaccttggcctcccaaagtgctgggattacaggcatgagccactgtgcccggccagatagtgaccttttaatatctaatttgttgacagttttcctactatacttttggtctagtaaatatttttaggttgtgatcaatgagattagcagtctttttcctttggacaggagaactaagaagaggacaggcagaaacacaaaataaataatatatataaaatatataatattatcatagctaaaattggtaggaattccagtagtcactcattcattttttcattcattattcaattaatgtttggagccacatattattatggcaggcactattctaagacaccaggaattcagcagtgaataatgcagaccaaactccctgccctctcatagtttctgtaagtcatacsttgcttaacgacagggagacgttctgagaaatttgttgttaggcgacttsgtccttgtgggagcatcctagagtgcacttaggcaaacccaaatggcagagcccactacacacctaggctgcatggtgcagcctgttgcttctaggccagaaacctgtacagtaggtgactgcactggatatttctggcaattggaacacagtggtaagtatttgtgtatctaaacatacctaaacatagaaagggaagagtaagaatatgagaccactgccatatatgtggtgtgtgattgacagaaacatcattatgccctgcatcgcattgactgtattctagtaaaagacagactctagacaagaagagtgaaatacgcatagctcatgaagttgggatgggcacaggcaaagatcrttaagtggaattaggaaggtgtgagggagattttagaaagggaggccaaggaagctgagaagatgccacctggggaaacacccgggaaacctgaaccacttgagccgcgtcggagtgcacaaagcctcctgcttggcgtttacatcattttccgtttcttgtgagggcatgtctcctcccgggagtgtatgaataggaagtggctgacagctggcttccatgtggtcttagcaggccctgtttttcccagccaggttccccttctagccctcagatttcttgacactaaattggtcataaagtaagttytcctaatcagatagattcattccagggtgtgttagtctaagagagtttggctagcagtccactagcaggctgtgcacagctctgtgaaatgctcttttctgtaaccatttcccgtggtttttggacaatgactggcatgttactttccttagcaacttaatttttgctccgtctttacataactctttggaaatgttaacttttccccttttctgttcatttgtttcactgtagaaatgaaaatactcctattcagagctatgacatacaaattaaaaatttacaaagtatactcaatagattccagcagctaatattcatgaagtataaaaattgaggttattgaagaaagtgacattaaaaggtgtatgaacaatgcagtgctcttaaagtttctcttgggtatagctgacttcaaatgtaagagtctctaccgtttaatacataaagggctaatacagaatagattctcttctagttcataaaggatgcactgttctctacaatataacattaggattttgaattgtttgaagggcttatcttggtttgttcttagcattggaaataaaatagatgaatatgctagaagaatggaaacatgggtataagctcatacacagataagtgaggatttcctttaggagtataaagatagaccaccatggagaaaaacctaacttaatataaagttgtttgtgttatatataatgaatgctttggattatatatttccttttatcactgtctgtttaagatagcttcaaaacatacatacataaatatacatgattgcaaccattgtgtgttacatttagtttaactttttagtgctgtccttaatttgaaaatgcatacagttaactttagtattatgacataattatttacaaacgaatcaatttttagaaagtgtattttttgatagctctgatatagggcctaggaaactgacaaaactagacaatttacatgagtctgttgtcagtaaacacatgaaatcatctttgtgaatgtccagatttattacagatgtttctagtagcccacaaatttttggaactattgtgttgaaccacttaatattaattagtacttaggaaataacaatgtaaatacttagagtgaatgatttattttattttaaaatcatactattgatatttgtaaatgagcagtatatcagtcataatgggctatgttgtatttcagtagcaaataactccaacaacacatttatttcttgctgctgctgtatatccatcacatgttggtggggtactgtgctctatgtcagggacttgagctgatggacttgtcattatgggaaacattagacaacttgggaaggagaagatgtatgatatgattcaattctgtgtccgtacccaaatctcatcttgaattgtaatccaaattgtaatctccatgtgtcaagggagggatctagtaggaggtaattggatcatagtggtggtttccaccatgctctttttgtgatagtgagttcttaccagatctgatgctttaaaagcgtttggcagtttcccctatcctctgtttgtctcgcctgccaccacataagacatgccttgcttccctttcaccttctgctatgattgcccagcctgaaaatttataaaagaattaaaagtgatttatgcatcattacaatattactgtatcttatatttgttcatatattcagctttaccaaagagctttatattttcatgtggtttcatgttgccgtctagcgttctttcatttagacttgaaagactccctttagtatgtgtaatacaggcatagtggcaacaaactccctcagcttttgtttatttgggaagggattaatttatttttcattttgtgggacagttttgtcagatgtagtcttcttgattggcagattttttttttcaccactttgattgtatcatcttacttcaacctgcaaaatttctgctgagaaattcactgatcctctgtggatgcttccttgtacatgatgagtcatttttctcttgctgctttcaagattctctctgtgacttttgacaatttaattataatatgtcttagcatgagtatctttggctttatccaattcagtttcttaagcttcttgaatttttgtgtccatttctcccctcacatttgggaaattttcagccatgtccctttctctgttcttctcagactcccatagtgcgtatattcatctgcttgatggtgtcccattaggttcttcccttttcttcattgttttttcgcttttgctcttctgactttatagtgtcatatgatctatactcaagttcactgattttttttttctgcttgatcaagtctgctgttgagcccctcttgtgaatttttcaattccattattgtatttgtaagctccagagtttctagaaatagaaacttttaatagttctgtttctctgattctgttgttattttgttcatgcatccctttcctgacaggttgctgtgagccgagatcgcaccactgtactccagcctgggcaacaagagcggaactctgtcttgaaaaaaaaaatgtgataaaagcggccatctgttgattggctgctatatatgggttagatgttttacttttgttatttcatttaatctcatttcattaagtagcttggccaggatcatggagtcagtaaggcggggcttgggtgtgatcttaggtctgtctgatttcaaaatctgtgctctcattgttaggctgtgctatctccctataggtaaaatgatgaggtgactctgacttggaagggaaagacagcggatcattattcagtttttagggacatatgatgatatgggttccattctcaaggaatctagtgggggacattgrttgaacaaaaaaatgtagaattatattgatgtacgttaattacaaaaaaggactggtttctgcggtagagaggacttaagggaatgccagtggaatgctgagatgaatctgaaattgagaattagtcaaggaaaacgtaatcaagaagttgtatcactcttctctgcccccaacaattagaggaaagagatacagagcaaaaatagtgggtcattgatggtcagtggtgtaatcttgaagatttagccaagactttttagcagtaagtggtagaatataaatgcaatggaaaggcagtcatcatcagagaagtaccccagaggagaagtgtggaggatgtgccaacactataaatgctgccatttttgcttaaggagagtaaaaaaggaaaatggggtcatggtgcactcattgttgtagatggtttgggtagtctggaatgagttcattgcctgcaagtgctagttcattcattacacctatgcttgcagagaaggggcggttgtgtgccttcccgagcccgcactagatgagtccctaagggtcttgtggttaatrctccttcctggcaaatggaccagggttcccggcagactttcctagcagccttgaagcctgggtctcttcgcctggggattataaagcagcatgttctcttgtttcctttctgaagtctttaaaggtttataggattcttttagtgggattcttcttttctrttgcttcagcatttccctttccatgtgtggaaaggacatatgttggttttatattaatcattgaaccccattggatttgtaaaatgtgagacattttgatccttcataatctttttttcttgaaaactaggaatttttgtttttggttgtataaatcatcttttcttacatacaacatcctaatacttggccagttgtaagtctgtttttaaattctttatgtatagtgacgagtctgagatacttgagatagccaaaattgaaatgcaattttgtttatgattaagaactgaatctttaaaaattttcacagttttgcacaacaaaacaaaatagatttttttaactttctttttgaatgtataaataatgaccagtaaaaatgttactagaaagcatgctacttctagatccttaagtcactagcagataggatgtaaggatatagaatagtggtcagcaaacttggccctcattcatttctggaaatcaagttttatgggaacacagtcatactcatgtacctattgtttaggttgagaccatacggaccacaaagcctaaaatgtttactgtctggccctttacagagaatgtttgccaaaccttggcattagagaagcaattctcaacatttttgggcctcagatctatactcttaaaaattattgaaggctctaaagagttttgattatgtgggttatattggtttaattaatttaaaaataactattaaatttgcttcatgttaacacaaataacatttttatgaaaaataattttaccctcaaaacaaaaacatgagtgaattgcaaatttctttaattcctggctcaacaggagacctttatatttttgtatctgtgtctactttcattttgttgctgtatgttccggttgaaggatatgaagaaaaactgaacttacagagatctgtagttggaaaagggaggagtattttaatagcctattcagttaactgtggatatttgctgttacaccaaagatatatggcagtttcttaaagataagtttcagtgtaaaatctgaaagtatagaaataaaattattgtattggaactttaaatccattgatcaatcttgagcttttaatggatgtcgttcatgcatgattttctaatgtgttagtagaaaatgggaaaatattggttcaccgaatcatgcagatcttcccaatgttgatacaaaatgccaaaaaaaaaaaaaatcacatttgttaataccaccrtgggtcttctcagcaaaggctttgggcattgagaagctgatagaaccagtgcaaagtggggacttggttccaccatgcgtgtatttcagttaacatagcaaaatgagcctctagtggatgcaagtttttaaaattctgatttttgcttggaagctcatttttatcattagcaacatatactgtttttggtttcccttgaaagtatggactctatttatcttcaagaaaatgtttgccaaataccgaagcttgaataaccatagtttgtcttcagttgttcttttaagttaaaaaaaaaaaagttccatgatcaaagcagccagtataactcacaactcaaatcattgcacaagtgttcttttgagacagtatttcctttgtttatagcagcagttactttatgtgtgcttccccttattcacacaggatgttaaaaagaagggtactcaagagtcaattaatattaatttttactgcttcattaaggatattctataatgaaccttccctctcccctcctcctcttcctgcttttcttccttttcctcctcctactctgaatgagcatccttggcagtgaagaacacaatgttgaatagtttcaatttggtgccattatcctgactcatgctcaggtgccagtggttttaccaactgtgaccattgcttttcaccattggtgcaaatgctggtacagtgcaaaagacaaataacatctcagtactttctttagtaattttatgaaaatagtttgacttcatggacccctctggaagggtcctggagaccactaggggtctgtggaccatgctttgagaatggctggtataaaaggtacaagtaccattttatataagcagatgtctgccacttagtatatgttgcctccttttattcttacaattataatttatgagggtccaaatatgttaacagatataagtctgcttcttgcactggctaatagaactaatgagtctttcagattgagcttttacaaaaatctgtgatagatttwtttttaaaaagtttactcttgtttgtgttattttattgctctattaggttttgaaaatgtaacttttgagtatgtgtatctggtgaaataatctacagttggatttctgagcacacttattcttctgaaatgatagattgctaacataattattaaagtagtttatgatgacagttaattacaagttttcatattcttgaacacttacccaaatttagaggaaatgtatttgaaaaktacttggtttcttgttgatatatattaactgtgtgtgtgtgtatatgttcacattaataaaaaatgttgcagactatggaattaattatttactgaaaacaagttttaaacacttgcacttctgtggttgaccactagatgtcatgagtgccacgggagcattaagagttacccagagtgggtagaaattgaacgttgtaagctcatagaccttcacatagttcactgtttccacatgatcagtgccagaggaacctgatacagtgtgatatatagaagcaaggtacaactggaataatgaaatttcaaaaataagcccttttaaaggagggttgtaatcgttctattgggtattgtaaatgcttcaggtgcacttgatactgctgttatgttcctggctttcgggtctttctcttttttatggaaagatggattgaacttcaatttaagaatattcggtaatccctcttaggacatactttacagctggtatttttgtgttgtagtaaatcgattccatacaacagtcagtaataattatggctgcgttccgacaaattccaaagcattttcaatgaattttgccaaagaaaataacatcattactacaaaagtttaactcagtttgaaagttaaacctagcaactttgcttcattccacaaaatacaaagtattactggttaggattctgtcaaaccattttttaaattcatatgcttgtatatggtctgagaaggtgattactttgtagtatatatacttaaaagataattgttttgtagtaaatgatacagctttggaaaaatttaaccttgagtgttcattatgaaataaaaaacaagaaatatgagggctttttgtatatggcatagatgaacagcagcaatatcagctcaaaaggatattttgatttggaatgtaaggtctttagtattaatggaatgtgaatgtttcaaattgtatgaaattctaattgatataagcatatgttgtcttattatatggtgtgtatggtttacaagcatgaaacattgtaagttctttaagctgtgaagaaagtgataggttgcatggtgtacatggtatagcatatgtgcaatctataccatataaatttaggcttttctcatgacataaagaaacttaaattacatatatatacacacacatataataaatacctactcacaaacatacatgcatatatattggcctaatggtacaaatgtgtctgcagacattttagaaattttaattgattttcattttttaatattagcaaaacaaaagtctactaattgactgtgttctttaaattatacagtctttttttgactttgaattacttcatttctagccttgctttatataaggaacattttcctgtagttgaattcatcacactgattttttagaataatttatgaaggcaaagcaaagttgctttcaaaattgttagaaaaaacagctccatacgtgtgcattagtgaaatcttgcctcacatttttaatttttagcttagtcagctatattttcatttggcatttcaaataacaattcttatattttaaattagcactcttttctatatggatttgtatgcatgttttaactatgtcagcctttgcaataacataaaggaaaattcaaggtattacagcagatagtctggtctaaaataatccatttgatggtgaagtttttaatacgaattttcactttaacaattaaaaagcaaatttagaaggctttaatagaatcttacagtttggattttttaaagtaaaatttggcaagttcatttctctttattctgcaatttgaatcagcaacttaaaggctttcagaattgatgtgaaccagtctttccagtgtttccaatgtttttttgttgttgttaatatatgttaaaaatatgcttctaaattactgaatttgctttatagagaattgaggaaagtgcattaaaaatgaacttaaaacacagtgtatggttcttctgatttctacaaaaatgtaaatggagtactttctctgttattagccaggggtgatccaaatttaaaccagatggcctccctctaggtgttaggccaatgtaaattttaatcttgctactttcttttgtgttttcattgtataatctcattacctgaattaaaaaaaaaccctaacaaccattgtttcttgtttatttaccatgtgtcagacactgcattatatgtctgagtatatttaattaccaaatagttctaatttactattgtctctatttgcatataaggaagttaaggcttaagaagatgaaataccttgttgaagatcacagaactagcagcattaaagattaggtcaaactctagatcccttgttcttagctactatgctatactgcctttactgcttatttgaggataaacattagttaagatagttattgaaaaaaaagttaatatttttccagataaagcaaaggttagtttttactaaaagaatttacttatgtatgctagcttggattgttagatttactttggattactaacacttctgtaaatctataataacatcttgcttccattctagtaaatattccttcaaggttagttgcagacatcagttagagaaccatgcatttgtcatattaggatgagctatttaaaaaaatacaattaggctgggtccggttactcacacctgtaatcccagcactttgagaggccaaggcgggcatatgacctgaggtcaggagttcaagaccagcctggccaacatggtgaaacccccgtctctattaaaaaaaaaaaaattagccaggcttggtggcgggcccctgtagtcccagctcctcaggagcctggggcaggaagaattgcttgaacataggaggcggaggttgcagtgagcccagatcgcaccattgcactmcagcctgggtgacagagtgagactccgtatcaaaaaaaaaaataaaaataaaaaaataaaaattataagttgctgacaatttatatagtctctgttctacatttagaaatgtagctgagaattatagtaacacagggaaggaagttgagaatgacattgacttacagaagcttcttaaaattatccacgtatccaatcagtgttcctcaacccaaatgtaaaaatctttaaggaatcctcaacacacgcatgcagaacattcatgttttcaattcgaagttgcttgtcaagatcagaaactctcacagtttgtacttgcatgtggtctgtagaaaaaattctgaagagttgcgatctctccaatagtgattgggatgagaattttgaattagttacagaatgttgtgatttggtgatggtccctttttaaaaaatataaatgtttctttcctttctagaaacggcttacaaaatatacagatcttggtagacaacgtggctgcaggctgttgaattggaattccctgtggctgtccgaaggcagggtgtccggagagcggtgggctgacctgttcctacaccttgcatcatgccagctttgtcaacgggatctgggagtgacactggtatgtgaccccaagaggggcagttctcattccatctttgcttaaatcttgttcacagtgaaatacagcatgctttaagcaaatgcaggcagatcatgcttgtttttctgtcaccaacactagggacataagatcaactcagggatgccctcctaggtaaaagttactggaggacatggactcattgcctctttctctgggtagtgatggcatgtgcdgatattctcatactgtcttgcttttagaataattctgtgcatttaatttaaaaaattaagtatttgaaacttatagaaaagtatggcaaatactgtgatacccatattatccttcattcatgtataacagctaggaactgtttgccacacttgattcatatttttctcttttttttttctttaagaaataaaacattatccttaccccaattctctgttttctgtctgtcaccagaggtaaaactatcctgaaattgatacataccattaagggattcaattaaaactaacaaacaaacatattttatgttattatcagttataagactttgagatacctagaataggtatttataagaaaggaaaaaaaaactaacacacacacatgtgtacataaaatcctccccttctgatctgattcaggaagtagaagtgtggtggtagatgcctctttgaggtcctgttctggaccagaatcagcactttttcaaagtgtaaaatcctggatgcctctaagaactactaaaacaaaatgtaaatggggttgggggccttatgtcatgcatttttaaagccccttgaaagaagtggtaacatagtgtgacgaaaaggaatgttctctgttttatatgggccatcctgaatttggttgatatagctctcaaaccagctgaggtggctgtctcagattggacaattacaatgactggtgctataatctcaaaaacaccgaaacagaaattcagttttatcttgtattatgttacactggcattttcatttgcactatttgcaaatataattctttgctatttcaagcatatccatagttatattttggcaagttttgtctcatctttatccatcaagaatgattttttttttccgctgtgatttacattgaggattcgtttttgtcaggaagaagttttgattgttagattatgtaaagcttttctttctcaagaccttaacttggaagccagaccctttggaaattttttttcttctttttaggttttatatagtcccacattgtgttctactttataaaaatgaatgatttaactttccatagtgctttgggaaattatggataaaatttatgtgaaccataaatttactacagtcgtgtaatgaatatgttttaaaccttgctgttcacccaaaatgccttagtttaatttaatgcaaaatatcgttgcttacatataacttgaaggaggattaaaatggagtatttatagtttataaggcagtttaggtgtcagtcatgaaaaatagcataggctattaagaatttaaaaggagcttttccacacacagccagctcgctgcagtgcaaatctaaagtgctgatctgagtgacaccttgctttatgatgttttctgaccttatgtccccacaaggtttgagcaaagcacagaagacaagagtctctgcatttacagaagccgcaaagtacggcgtatgcatcagatgtttgcaactggccagtcgggtcatttttcccataagcagcgttgcttagcagtgtcgctgacgtcgtcccattagttccaggggaacagagttgaagtcagacccttgtgccacaggagcaaggcacccgactcacagcagcctagatgcatggattgctcatttgggaaaatacgttctgtgtaaaacttttaccacttcttctttcccttcttgcttatttcacgaagaaaaaaaaaactaattatacaagtaatacataaaaacatgccgctttcccccgatctcattttttttctccgtttgataagtagcctgtaagagtttcctgtgcattcaatacttgcatatatatgtcattaatacattgtttttgagtctcttttccttttgtttttaatcacagattttgttatgccctatttattattcttcagctttttttctacaccaagctatattcttggagagatatttccgtgttaaatatagaaaagtgttggtgtgtttacgcacgtttatctatatctctctatacatctgtgtatttatctcattcttttaaactaatgtatacttttccatcatattgctgtttagtgaaccatattgctgttaacaaaagcctggttttgctccttttgtaaatattttggaagggaagatgtacacatttaatgatgtcaaattgtcctccagagtggttaaaccaccgaatgatctacagtcagtgtattaaagatgctttcccctacattcttggcaatattaaatattgtcaatccttgtaatttttaccgatctgttgggaaaaacataaaatcttaagtgtgaaatgtgcgttactagtgatagctagcgtatttccatttgtttaatggtcattcctctgtgattcatctcttcatatctcttccccatttttgtactggttcgtcattttctaatttacttgcagaatttatttacattttgtgtattcatcctttgagccattataggttgaacatcatttcttctggtcagtcatttgtccttcttattccttaaataataacatttcttctataatagttgaaaacttttttgtagtcaaatcaatcttttctgtatggtgcatgctacctttcttctgcttaagaaggcctttcatatcccaagattatgaagatattctctaagatttttaatagttatcttaaagatttgtttttacacatttgaaattgtaatccaactgtaatctgtatgtggagcatggcagtagtctaatctcacctgattttattttttcatgtagtccaccaagtccctagatcacttattcaatagtctgtcctttccatgtatatttttaatatcccctctatcataatccagcattacatatattttctgagttctctttcttggctgtatgatctgttgattatatttaattttttatagattatttttagagcaattttagaattatagaaaaattacgaagacagtacagagagtttcaatatgccttgccttagtttcccctgttattagcatcttacattagtatggtaaattcatttcatttggagaaatgatattgatacatgattattattaactaaaatctgtactttattcagatttccttcattttccgttaatgtcattttttttttgttccaggatctcattcgtaataccatattacatttagttgtcgtctctcattaagcttctcttggccataatgatttctaagactttagaaatcaggcacagtggctgacaccttaatcccagcacttcgggaggctgaggtgggtggatctcttgagtccagaagtttgagaccagtctgggcaacgtggtgaaaccacatctctactaaaaatacaaaaaattagggccatagtggcatgtgcctatagttccagctacctggaaggctgaggtgggaggatcacctgagcctgggaggtgtaggctgcagtgagcagtgatcacaccactgcacttcagcctgggcgatggagtgagaccctgtctcaaaaaaaacaaaacaacaaaacaaaacaaaaaacaacaaaatccaaaagactttccttgattttgacaatcttgagagttttgaggagttctggttaggtatattgtaaggattcccctctcctggaatttgtctgatatttttcttgtgaaaagattggggttatgtgtttgtggggtaagatcagagcggtgaagggccattgtcatcatatcacactgagggtatattctgtcaactcgatttataactgttgacattaatgttggtgacctgcctaaagtactgtgtgtcaggtttccccactgtaagattactctttttttcatcctttccatactgtaatctttggaaaaagtctctttgtgcagcccacacttacagtagcatgtgtcgtttctcctcctttagggtaaaggagctatctaaattatttggaattctttgtcttttctctcccatttattaatttattcagtcattcagatcagtatggagtcatggatacttattttgtactttgggttataagccatgactactttattttgttgctcaaattgttccagctttggcccttgggagctctttgagttggcttccttgataacccccatcaatgtgggctcattggtttttagcacttccttacttttgatactacaaatattcttggctcatcttgtgtatttcctgccccagtcctagaagtagacatttctctaaggggctctagttccttttgttgggatgggcttagaaatcaagatctgggcaataggtttgcttatcgctgctggagtgttgtttctttttcgttttgttttgtttcatttcgtttcttttctcttttctctcctccttcctctctcttctctcttccctcttctgtcttctctcttctttccctctgcctctcctttcctttctttttcttttcaattcttttcttcttggtagagatggggtaccctgtgttgcccaggctggtctcaaactcctgagctcaagtgatgctcctgcctcagcctcccaaagtgctgggattataggcatgaggcaccgcactcagccttggagtgttgtttctctcttttttttttttttttttgagacggagtctcgctctgtcgcccaggctggaatgcagtggcgctgtctaggctcattgcaagttccgcctcccaggttcacaccattctactgcctcagcctcctgagtagctgggactacaggcgcccgccaccacgcccggctaattttttgtatttttgtttttttttaatagagacggggtttcattgtgttagccaggatggtctcggtctcctggccttgtgattccgcctgcctcggcctcccaaagtgctgggattacaggcgtgagccaccgcgcccggccggagtgttgtttctttaagcctctttcagctgacaaagcaaagaagtgtatgtgtgtaagttaacccatgcgtaaacacacataaacgtatatgaacatttcaatgtgtaatcatctgtaactatactaaactaaatatgagttctcattgatgttttcaactctaatccttagcaaacggatcattgtagcctcttccccctccaacagtggaaaacctgctactaccatccaccatcgatttacttaattgttcagtcccagtgtacgtgtaccaatatagcagtatcagaattgttaacccatgggaaacaacttttattagctagagagttgattttatttttattcccgggatagtgccatactatctttatagtttttaatcttatggaatcattcctttcctgcataatacctatattagttttagttttataatttcattatgatttttacaagcatcatataatgtgaaatataatataggtacagaaatgcacataaaaaacctttataagtagagttttaaaagtggttataagccagcatccatgtgacctggtcatatccatgtgaccatcatccacctaggtcaaaaattccaacaccttgaaggcagcctgtgtatctcttctcagtcacaatcttcccaacccccttaatgactcctacgtcagactacacataagacatagtttatgatttgtataagcattcataggcaatgtggtttaattttgctggttgaactttataaatggaattacaccataagcagtttttagtttgaaagtgaatatttatttagaatgaaaacatattgtaaattttcgaaagtggctacatataacacgtattatagaatccaggggaaaagtattattttaaaaaaattaactccctagcacacctccataaagctttttcttctatatttttggctgtctactctttgcttgcctcttcatgtgtactattttctttaaaagaagagaaaagcaatccaatccatcttacgttaccratcaatttgtgtgtgtgtrygtgtgtgtgtgtgtgtgtgttttaagagacaggatctcactctgtcacccaggatggagtacagtggtgcagttgtagctcattgcagcctcaaactcctaggatcctcctgcctcagtgtctcaagtagctaggactttaggcgcatgccaccatgcctggctaattttttattttttgtagagacttctgtgagtcttcctgtgttgcccaggctggtctcaaacttctgggctcaagtgatcgtcccaccactggcctcccaaagtgctggggttacaggtgtgagctattgtgcctggccttacactgatttttgaatgttaaaccaacttgcattctagggataaacccaatttggtcataatttactatcctttttatatatttctggatttggtttgctcgtattttgtttagaattttgagatctatgttgatgagtgagttcagttgtaatttcactttttcattctttaccgaatttcaaaaagtcatgctggtctcgtgtagtgtattgggaggagcctttcctcttctgtggaagagtctgtgaaagattgatattaacttttacttgagtagaacttacctgttaggtcacctgtgcctgggaattttctttttgataagatttttggtaactaattcatttattttaaaggttaaaagaatattctagctttctgtttcttcttgagtcaattttggtgatttacagttttccaagactgtccattttatcagagttttcaaatttgttgggaaagaattatttgtattattattacttcgtacctgtagtttctacattgatgcttttttttttttggtcctgatgttggtaattttcgcactctcttcctctctcctcttaattttgtgagagttttgtcaattctattagtctttttagatataaaacttatggctttattttctctattgtacatttgtttttatttcattaatttttactgttctttttctaatttctagaaatactttgtttataaatatttaatctttcccttttcctaatgttcacatttaggactatttctcgctaagttttgttggctctatttgtgctataatttaaaaatattttctaattttattaagtgtttgctttagaatttttgtaattgattatttagaattaaaaaaatattcacataagagtttttttcatttttttttttttgttactgattttttaccttaattgctttgtggtcagaaagctgaatttgcaccattttagccctttgaaatttgtttattttatggcttagacatatggttaatttcaataagtattctgaatatgtttaaccataggtatattctgtaattattgactgtagttttctatatgtgtctattaggccaaacttattgattaagtcattcaaatattctgtattctaattgattttttgttgctgctgcttattccttcagttaccaagagaagtatttttaaaaatctccctcagcgattatggatttatcttgtagttctatcagtttttgtttagtttatttatttatttatttgagatggattctcgctctgtctcccaggctggaatgcagtggcatgatcttggctcactgcaacctccgcctcccgggttcaagcaattctcctgcctcagcctctggagtagatgggactacaggcatgcaccatcatgccagctaattttttgtattttttttgtagagatggggtttcatcatgttggccaggctggtcttgaacttctgacctcaagtgatctgcctgcctcggcttcccaaagtgctgggattacaggcgtgagccactgcgcctggccttcttttgtatatttaaatatgttattttgttggtatattaagccttttaaataaattttatattgaagtatatactttttttttctgttagcactgagtagtttatctttttctgtccttttactttcagctcttctgtgttcctaatgtattgatggagctcttgtgaattgcttgtaattgawgctttttggggttgtacaaatctttgcttttaactagagtattttcaatacagttaacgtaatgactgacttttaaaatttaaaatctaccatcccattttatgctttctctttgtcctattctttctttctattacttatattttctttggactgattagaatatttctatcattttcatttttcccctatgtcttgatgttatacattctctttctgttgttttggtagtttccttcaaaattactacttgaatcctttattttaaaaattcaacattaatctctaccttcattgtcaccatggacaagctaaggaccttacaggacttctacttcatatgttcccaacttacatgctactgtgtcatgtattttcattctctttttaaaataaaaaaccccagaccttgaagatatcattgtcacagttctttttgtttttgttttttttttttgagacggagtctagctctgtcacctaggctggagtgcagtggcgtgatctcagctcactgcaagctccgcctcccgggttcacgccattctcctgcctcagcctcctgagtagctgggactacaggcgcctgccaccacgcctggctaattttttgtatttttagtagagacggggtttcactgtgttagccaggatggtctcgatctcctgacctcatgatccgcctgcctcggcctcccaaagtgctgggattacaggcatgagccaccgtgcctggcccattgtcacagttttatactatcagtattcatttagagttcctcacatattaccattttctttgtttacctccaactcacaactcagcattttcatccaccatggtttttccatctgcttacagtaaaaatctttagaatttcctgttttgaaggtctactgctatcaaactgtctctgttattgctgaaaatgtttttatttgtgctcattcttggaagtagtttttaccaagcacataacgctaggttagcagttattattttttcctcagtgcgctgaaagcaagaggcaatgaaattatatattcaaagtggctatttaaaagtcagttgtcagagtctctctttggaagtaatctggcttctttctctggctgtttttattattttctttttttcttagatgtctgcactttcactattctgtgtctaggtggaatttcattttctatgccttatccagaattcatttggctttttgaatgcatataaatccatgtatttcatgaattctggaaaaatttcagctgttaatcttttaagatgttacctgtacttcattcttcctctctcctatcattctagtgttccagttaaatatgcctaagacatttcttctatcccttatctttcttaaccctcttatatagttcagtcttttttggtctttccatcagccatcagccctttgagtaattctcacctatcttgtttggttaattcttttttgagctttattgctctcctttacatgctggggctgagtttttaatttcaatgatgatgatgattttyataagaagcaactgcttagttttttttcttttctttttttctgttttttttgagatggagtctcactctgtcacccaggctggagtgcagtggtgtgatctcagctcactgcaacctctgcttcttgggttcaagcgattctgcctcagcctcccgagtagctgggattacagatgtgccaccacacccggctaatttttgtatttttagtagagacagggtttcaccatgttggccaggccagtctcaaactcctgacctcaggtgatttgcccaccttggcctcccaaagtgctgggattacaggtgtgagccactgtgcctggccaagaagtgctgcttagttcttttaaaaatgtttggcccatgttcaagttgtttgcactatagatcagtttgcttagggaagtctcgttaacctcacttctggtaccaaaatcatgatcctttatccttaaagtgatagattcaaattactgaaggtaatgaatatatcactgagatttaccactcaaggaatccagtttaaaaaacaaaagtggattttactgatatcgtcagtgtcatgaaattactttgttctcatctttcgtataaaaaaaaatctcatgttaacatttttttcttcttggtaattcatatatttccttgtggaaaagcaaggtcttgaacttgttgcttttttcctccaacagttcccccacccaaagtatactttgctgatttgatttgatcatattcatacttttcggtttctttgcagagcaaattaagattgttgggcaagtagttcagtcaggatggcaattattaaaaagtcaagaaacaacagatgctggtgaggctatagagaaataagaatgcttttatcctgttggtgagagtgtaaattagttcaaccattgtggaagacagtgtggcgatttctcaaagatctggaaccagaaataccatttgatccactaatctcattactgggtatatacccaaaggaatataagtcattctgttataaagatacatgcatgcatgtgtttattacagcattattcacagtagcaaagacatggaatcaactcaaatgtccatcaatgatagactggataaagaaaatgtggtccatatacaccatggaatactgtgcaaccataaaaaggaacaagatcaaccatgtcctttgcagggacatggttggagctggaaaccattattgtcagcaaacttatgcaggaacagaaagccaaacactgcatgttttctcttgtaagtgggagctgaacaatgagatcacatggatacaaggaggggaacatcacacactggagcctgtcgggggttgggggtgggggaagggagagcacccggaaaagtagctaatgcatgtggggcttaatacctaggtgatgggttgataggtgcagcaaaccaccatggcacacgtttacctatgtaacaaacctgtacgtcctgcacatgtatcctggaactgaaaataaaaattaaatttaaaaaaagatcgttatccatgtagttgacctcaagctgttctctgtgaacaagaagcagtgtgtgaactggcatttgggaaaaccttctttttgggagtaatgtacttccttgtacacagagcttgtattctttaacactgaatcagtacacttactcttgtccttgtcactactcacaaaatatttagaactaagtgaaaaagtcctcttcaggtattatggggttttcagtgataaactaaagaaaatcactgagtattcttttcttacaatgtttctcctgcgtgcagagagtatgcctcaatgtttgtcatatcagtagcttcctttaatggtaaggtaaaatacctgctagcaagcatacataatagtgattagtttactacattgcatgcctttactgttaaaaaagtcctttcatataggaattttaccagtaatctttatcagtgcataatatttgtgtttcatttcattgctcattttagaatctttatgggaatagtgcgagttctgcttttgctgtaaggagtgtaaccgttaatgatgtctttgtagtttatttttcatttttaagattttcttattgagataaaatatgtgtgatataaaatttgccatttttaccatttttaagtataaaatttagtgtaattaattgtattcaaaatgttttatgatcatcaccactatctgcttcctaaacattcttttcaccccatacagaaactcagtaytcattaagagtaacttgacctggccgggtgtggtgggtcactcctgtaatccagcactttgggaggccaaggtgggtggatcacctgaggtcagaagttcgagaccagcctgggcaacatggtgaaaccctgtctctaccaaaaatacaaaaattagctaggcatggtggtgtgcccctctaattccagctactcaggaggctgaggcatgagaatagcttgaacccgggaggtggaggttgcrgtgagccgagattataccactrcactccagcctgggtgacagagtggggctcaaaaaaaaaaaaattaactttacctgtccctctccctccagcccatgtcaatcaccattctactttctgtctctagaatttgtctattttagatatttcatgtaagtggaatcatagagtatttgccttttttcttcactgacttattttacttagcataatgtttttaaggttcatctgtggtgtagcatgtatcagaaattaatttctttttatggtggaataatattccattgtatgtatatactgcattttgtgtatccatttatcagttggtggacatgtgagatgtttccatattttagctattgtgcgtaatgctgcagtgaacattgctgtacaggtatctctttgagtccttgatttagatgcttatgtgtaatataatattgcctaaaattagccaagtcactgggtttaaaaaatataatattcattgtcacaaaaataagtatgtccctgtgagtgtagtttcctggtcatatgataattctgtgtttagctttttaaggaaccaccaacctattttccatggatgccgcaacattttacatttctaccagcaatatgtgagggttccaatttcttcccatccttatcagcatttgttatttcccatagtttttgattatagccattgtaggaaagtgtggagtgatttcattgtgattttgatttgcatttccctaatgactaatgacactgtgcagttttacatgtactttttagccatttgtcttctttagagaaatgtttactgaagttttttgtccattttttaattggattgtctttgttgttgagtttccctgttctctatatgttttggatattaaacacttaccacatttatgatctgcaaatattttctcctgttttgtaggttgtcttttcactttttttgataatgtcctttgatggacaaatgtttttaattttgatgttcagtttatcaattttttcttatgttgttgatgcttttggtgacatatctaagaatccatgatcaaatacaaggtcatgaaaatttactcctatgttttcttataagagttttatggtcttagttcaaatatttaggttgttgatccattttaagctaatttttgtatgtggtgtgaggtaagggttgaacttcattcttctgtatgtggaaattccattgtcccagcactgtatgtagtttttcatctctgcatttagtgactaccagtttttatcctgggaagcactagtttgtgtttatttgcagaataaatcactattctttatttaaaagttactagagaactttgatggctttataccactgtttgacagaatttctcaactgacagagcactggggataggggagagtggctctcacaatttttaaatttagaattaaaaaatttttatttttatttttttgataaacaaaatctaattcttatggtcatgttttggtcgtttattttttggttacctaaatgcatttttagtttaacttctcctaacacagatagattcatgctgtgttttaaggttggaatcctgttaactttctccattgatgcttttgttatctaatagtaatggatggaagaaaagggccatataaaattaatctacgttaaatgggggatggaaagagcatgttaaatagtagcaaaaatgatcagaactttatccagaaaagggaagcaaattatcatgtttttaatttaatgaaggacatattaggttataattttagctttgtactaattcatagaatgtagaatggattctgctgaatttttctttgttggcttaatattgctcacaacattttgtgacagcactttgttttacttccagaaagtcaatgaaaagagcattttaacaaaaaaatttgcagtcttcagtttctctaggtttttttttttttaactttgatattcacattgttctcttttcaagtgtaatatgttgttaagcacgttagttttttcttctagttgttaactgggtaagattttcagaaactaattcatctccagcattgcttacagttgaattttctcacctctgtgaaattgtgtatttatttattttttctttttgagatggagtttcactctattgcccaggctggagtgcagtggcatgatctcggctcactgcaacctctgcctcctgggttcaagtgattcttgtgcctcagcctcctgagtagctgggattataggcgtgtacgctaatttttgtatttttagtagagatggggtttcaccatgttggctaggctggtctcgaactcctgacctcaagtgatccttctgcctcggcctcccaaagtgctgggattgcaggtgtgagccaccgcacctggccaaaattgtgtatttttgcaatgacgtttatggcatccaagataaagaccaatgacattaatagagtgagcatgtgttaggtgggaagagatgttggaatgaagcctaatattatacatttcagtttataggtgaatagccttatatttactttcctttgtagccttataacacttgagactcagatcagaaatactcagaagattgggagcctctatgtttgcattactatttttgattactactgtaaactaatcctgtctttgatctgttttactcagtagaatgtatggctcaatataattgtaattttgtaaaacagtaattctccaaacacaaatggcaataagcaaatgacagtggaagttagttagaagaactctgacaaacataatctctacagtacttgtatagccttatgcaacgatgatggaatgagatttctgcaaaaattataatcatgctgcaaatttgagcataggtgaacaaaatcttactgactgaagcagcttgtggaccacttgaaagattattgggaccccgcattgtttggcaggccacaccttaagaaacaagaattaatctggtctcttgcactgtttcctcagaagattcgagctcagtgattagtgtggaaaatgcccatcctcgcttcctagcagtttcttgctcaggagaaaatgctataacaagtgactcttaaatttaagagagcatatttcagtggtcttataaaatattaatacatttgaatagttatattgggaggctttttttttttgagacagaggctcgctctgtcacccatgctggagtgcagtggtgcgatcccggctcactgcaacctctgcctcccgggttcaagcgattctcctgcctcagcctcctgagtagctgggactacaggcacctgccaccacgcctggctcatttttgtattttttagtagagacagggtttcaccatcttggccaagctatttttatagcctagatccccagtatgcttatgtgtatgtaatactacctaaaattagccaaatcactaggttttttttttttttgagatggagtcttgctctgtcacccaggctggagtgcagtggcgcgatcttggctcactgcaagctctgcctcctgggttcatgccattctcctgcctcagcctcccaagtagctgggactataggcgcccgccaccacgcctggctaattttttgtatttttagtggagacggggtttcaccatgttagccagggtggtctctatctcctgacctcgtgaccgcctgcctcggcctcttgaagtgctgggattacaggcgtgaaccactgcccggccatcactaggttttaaaaattgtaatattcattgccacaaaaaagttttgctttttaaatttttttattgttttttaatttttaattttttgagacagagtctcactctgtcaccctggctggagtgcattggcgcaatcagggctcactgcagcctcaactcccaggcccaggtgatcctcctgcctcagctgggactataggcacataccactacacctggctgatttcttattttcgtagagatggggtctcaccatattacccaggctagtctcaaactcctgagctcaagtggccctcctgcatcagcctcccaaaatgctgagatttacaagcctgagccactgtgcctggccacttttttttttttttaatcgtagtacaaatcttagggttcagtcctaaaaagagtttgtgatggcttgagtgaccaaatatattaagaattgtcttggtagatttcagattcctgttgatgtagaattgttcaatattaaaatagtcttttctgtttgtgaatatgaacttttttgtccttcaaacaacatgaccttttcctcttagaagagaactttagggatggatagtaagcagttccaataaaaatggagatcatatctagaagatgatttcattctgttaagatgaaattaaatagctagcatagcactattgaaaatactgataaaaactttaaaatattttatttgctagcactcacattaaatgttaaacttctctttccgatatagtgcagcactcgaatcacctagattttaaaaatattgcccagggagctccagtgaacatgttttaagataaggcacagactacctaaggtatatatattttgctttgtttcttcttgacaaatttaggggttgtagaaaaatcacctccgtacgtatcttgaagggatttttactctagcaagtgtctcttagactgaattttcataacatgatttggatgtaatgagattattgggattcgcctcattacgtggggatctagtttatttgatttcacttgtttctgaaatggtgaaccagcagttactgctcttggtagaataattcctcaccacataactgatttgaagtgccactcttatcttgtattcagttctttatgcatcaccagtctgcttctggatatttcattatgtgtcaggaagttttgctggctgctcctttgttcttttgggtgggaaggatttaatcccaatagttatgaattctgttgctaaaaaaaatgtcacctgtttagagaatacttgagtgtggattgaaaggctgggaagcatttaacttggtagttatcagtagtgaaccaccagtttgttatttttagctaaaaagaaaaaacgtttacagcttagattactttatttttctaaaattcacggtggaaggaccttagttattattagttgcaaactttctaacctaccatgtctttccctattgaaatgagggttcgtctttttgttagcttgaggtttcttaggagttcagccgctgcattattgtgtaacaggttgttcttggagaatgtttgcaaagaaagccatttaagatacttttatcccttgaactctgctaagagccttcctttcacttaaatgctttttaattccactaacaagcctctaagaggatatgataaagatgacaatagaagctactgcttattaagggccaaccttgtgcttgatgttttttatgcttttgtcccgttgcaaaactgggaagcattaattagatgctacatactcattctttatctctgttgactatgataacagctctaggagaaaagcctacctctctttctactacatcatctctacaaccaaataggccactttctgcttccatggtttctcttgccatgaccaatacttcctgatcaaggttagcacctactgatctgttgattgcttaccacttaatacaatgaatgctggctacagtaatgtgatgagaggtaagatttgaattgctaccttgcaatgtaatgtaaaatccagatttactgtccagtttggtcaaactacatgttatgcttgagataagtcctatcttactatgaatatcataaagccaatactgcattttagcttttatagccaattacttcaagtaggaaagcctgtaattgttttaatgtaacgtaaatgtaatcgatttttggaaaggatggttataggccataatttatgagctttagaagtaattttcatttttctatggctttattttttgggtgaatactgctaaaaatcaaactaccatcgtatttattttggtagtagagaatactttgtgcagagctacagactattgacagttaattacaaattggaacctatttaaagcttagagatggcatgtacaaatgaaagttaggtaaagttgtatgcatgttcccctgttaactcaccctgaatttatggactttaagataattgtataaagtgttatcaagcaagctgcaatactataattatttagattgttttacatatttacaaactcagctggcccaatgctttaataagttatttgcagttgagggaaagtgtgagaaagagattgcctctctcagggttgtgttagtattttagtgtactataggtagttttggaaataaaacatactttaaatgggaaaaattgcagcctgttatgaatggcaccgaacagtgctgattattttacctttgacaaagtggaaaatttaaagcttggtgtatcctattttattaatataataaaattttatagtgttgttctgggcgtcgatatatgttctttagtgtttattagccctaggttatagtaaaacgttttggtccgatgcctgaccatactgcacagaatgcaaatgtgagaactaagacaaaaaacacgtaaatacatatttgtttttccctcaagtctttttccatatgacttctagatattttggttgcttatatgagtatgattgaacccagagaacatctttttttatcatttaacataggtttatggcttccccagacttgtactaataatgaagctatgagggatatgacaagaatggtgatattaaatttctctagactaacagtaaatttttccgttctgatgtcaggaatgttgagcatctggaatctgcaagcagagtgaattgttcgctgcgggaacactttcatcaaattctgagccatttattctcttaggaaccactactgtcttgtacagaatattatatttttacagaagcagttttctggaattggaaaaatgtctttccttcttgtgcttctgtattttttaaattttttcccattttagatatgtcattgttttgaaatttagtgtcacattttagcattgaatttatgtttttaggtttaaaagcaataagttatatttgttcaaattctgtgagaaagcaataggaaataagttgttctaaacgaaattctctttatagtttgtataggtggatctatgctccgtactttgtcatcattttccttgtattttcagaatatctatgatatatagttagatcaatagatctagatacttgtgccttgattgtggcatagatgtatttcttgaaaaagtgctgtggaggtggagggaaggaaagtgtgaaattctctagtttctctagttttgtttcaaacatttctgaaatgaggaattgagattctaatcggccctaggtcgtgctgggtatttaaaataagtatctgttggtgtaagttacatgtttgttttattttttaaaaaaaattctggtgtttttaaattttgttttggacaacagaaacttctattttatttagtaattttttactttgaattaggctttcctgaatcttgattttctttttttggttccttgtgtttggagactgtgatcgcatggcagtaggtatcattgcctagaatatggcctggatggtttgattagaaagcctcctattaggtcttatagtgtcttcgtggcctgtgactaacatatgtttgaaagtcagttatttactttaagggagatatttctgcctccgtttaacattagttagccaatcttttacctgtctgtctcacctgttgttgctgagactaaacatggagctgataaagctgcatttctttcttccacacacgattttgctgctcaagtgtgcaggatcacagcttgccaagtgcataaatggttttagtgtcatattgatcctttaatctgaagattaattcctctacgactaaatccctttgctctgtattctagttctcccccaaccacctctctaccaccgctgccctacccccgactcctttccagcgtccgattttatttatcacactgcctcagttgaaccatagccaattctccaccggcctcttttggcctcctccctactgatctgaagttagctatcactgctactttcaactgttatctactcatcactttgatcaggctcctcagtaactttcagttgcattacacatcgttattttcatttaggcgtaaagtctccatgaggagctatgaatcatcaacccaatatgtgttagtaaatcagagctcacatactttgcctaattctctttaggcgttctgaaccacaagcatttgggtaagttggaggttttattttttgccttgctttgattgcttttgatgtagtccagctggtgtatgcttgctttatagttttcctgatgaaaagacggttctctattgtttgacaaacatgacaaccctggtaattttcccttttacaaagcatgaggactttattctcatctttttaggaagaaaatatgtttcctggcttcttttttcttactacttccttttcccttcccctgcctcatcttagtaattcagaagataatttctataataaaggtgggttttgtgaaatggttcctagcaaatggtaaagcctttttttgtgactttttttgttaaaagttcttccctgatgcagtttttcttttcttttcttttcttttcttttctttttttttttttttgagacagagtctcactctgtcaccctggctggagtgcagtggtgcgatctcggctcactgcaacctctgcctcccgggttcaagcgattctcgtgcctcagcctcctgagtagctgggattacagacacaccagtacacccagctaatatttgtgtttttagtagagatagggtttcaccatgttgcccaggctggtctgaagatcctgggctcaagcaatccacctgccttggcctcccaaagttctgggattacaggcatgagccactgggcccagactaattcagtttttctgacttctgagtatgttatatccttgtctaaaggatagccttgttgagttgcaaattctgtcagctttttcctatataattaatatagcctttgaaatggaagataaaagtgtattaaaaactttaaagcactgaaactataaacaggaacctgcaagcatgagttctctacattttttttctgaatatcttaattacatccagaaattttagaaaaattgctgggagaattaatgttaaaaggctcaaaatcaagactttgagtattaaaaatacttctagatgaattatattgctgactctttttgccaccatctctgaatgtaaccaggattttccaagttttcgttctgccaaaaaaaaaaatgaggataacaatgcttaatactaacaacattgaccctatatctaatgaactgttttgtgctgtcacttcaagagttagggacccagagatccagacagatcgaataatttgaatgcacatttgttgtcagcaggtctgttctgagtaataattgtttcaataagcccacatctgtatgccatagctggtcatctccagtgtgtgtgtttattatgtctaacactggtagtctggaggaaagtgcaaattatttctaattacctcaataaagggattaatattatttttctgtatcacttgaaacattgtctaaaatgactctgcaactatttcagtgtggttagtgttaatgacaaatgattggttccctggagtctcagtttggattttgatatagaatgtgcactggtgtacagtttacatcagccaatattgtcagtatattgttaatagatacatactattgatatcaccaaaattatagttgtctcttgcaaatatatgttgcattatctttatattgaaagttgtttttaaattttaattttttgagacaaggtgtcactgtgtcacccagcctggagtgcagtggcaccaccttgactcactgcagcctcaaatcctgggctcaggcaatcctcctttttttttttagaaacggggtcttgctatgttgctcaggctggtcccatactcctggatttaagcaatcctcctgcctcagcctcccagtgttgggtgttgggtttactgggtgtgagtcactgtgcctggccaaaggtcaattgggggagggtgcggcaggtgtgatcacatttttaagttctcatctctcagttcactctacccaatacatggggtctgttgttgcctgtctttattgcctattgtgaaagctttcttttccccttaatgcatccagcaggataaacttacattttgtcatctgcctccttaatgcttggacatacttaataagttttagcatttaatttggaattatttttatttaaaagatgcttacataagttgttcagcaaagcaaggcatcattgtaagctttacaaataactcatttaacccttataacaattctgtaaggttagcatgactatacctgttttacacaataaacaatggatacacagagatgtttaccaatatgcccagttgcagagctgggatttgtaattatgtcgcatggctctagagtctaagcatgagcctagagtctaagcatgctaccccagggcctttgtaagtgcggttctctttctgttcctcacttcagcacctccaagttaatgtctgtgcttccttcagatcccagcataattgtcgcttcctcgagaacgctgtccctgagttgttcacatctctctctcttatacttttcctggtgcaacaacctcctcttgtatagggcttttcagagttgtcactttgcatttattttcatgattatcgatatctggctgctaccctacactggggaaaaaacttgtgtttgcttttattttttttttcctcccttctttgtaaccgcccaatgggttcccttgcccactgcctagacagaactgatttatcaagacaggggaattgcaatggagaaagagtaattcacacagagctggctgttcaggagaccggagttttattattattcaaatcaatctcctgagcactggggagcagagtttttaaagataatttaaagaaatttgggtaggggcttgggaagtgagaagtgctgattgttcaggctggagatggaataatagggggttgaagtgaggttttcttgctgttttctgttcctgggtgagatggcagaactggttgagccagattacctgtctgggtggtgtcagctgatccatcgagtgcagggtctacaaaatatctcaagcactgatcttagatttttcaatagtgatgttacccccaggagccacgtggagaggttcagactcttggaaccagaggctgcatgacccctacactgtactttctaatcttgtagctaatttgttagtactgcaaggtggactggtccccaggcaagaagggggtctttctgggaaagggctattatcagttttgcttcagagtcaaaccatgaactgaatcccttcccaaagttagttcagcctatgcccaagaacaaacaaggacagcttaaaggttagaaacaagatggagtcggttaggtctgatttctttcactgtcatactttcctcagttatacttttgcaaaggcggtttcatcgtcacggcatctccagcccttcatagtgcctggcacatagatagtaagcactcggtgtttgtggggtagggatgagaaaggctcaagaggagttttgaagtgtggaggggacttgggagcttgccagcttccgaaacacgcctcttgaaatgttggcaagtgtgttaagttaaacctgttaatgaaactttgatgtaagcatgttaccatgcttctttcatctttcaggtagtttcagggatcctgaagaatgggaacatgacagcagtagcagtcatcaggaaattaattatctggtgaattggtgtaaagtttcctggatacagttgtaatttcagggtacagcaaataacaattcactgtggctggaaaagaatttgaggagaagttgtaaactatactgctgaaaacaaggtttacagcagattattacataaaaatgcaatttggaaatttataaaactgctgtttatcttgtaaaagctcaagcagtgtagaaatatatatggcaaaaatgaaagtaattgtctcctgttccttttggtttttcttccagattaaacattgataacagttagatatggatcctactatagaaggctctcggccacctagagctgtaatgaatgagtgaataaaggtgaatttcagatcaaagagaatgcaagctttcaattttcatattgccaacaatgtataccaatttatgacttccctggatccttcattccctctgggaaacccagaggctctgaccaaccttctctctctctctctctctctttttttttttttttttttgagacagagtctcactctgttgcccaggttggagtgcaatggcatgatctgggctcactgcagcctccacctcccaggttcaagcaattctcctgcctcagcctcctgagtagctggggttacaggcatgtgccaccacacctggctaattttttttgtatttttacaacagggtttcaccatgttggccaggctggtcttgaactcctgacctcttgatctgcccgccttggcctcacaaagtgctgggattgcaggcatgagccaccacagccagcccaaccttctcttttaaatgcaaacattttcttccatgtcctcactctcagcatgaaaccctgtttcctagtttactgaaaatagcgaaacaatcttcagggaattatcacatgttccctcaaccacatttgccccacgtggggcatctgctgcctgccttcctctgtgggaccatagaggagctgccctcttggatttaatccacctgcgcgcttgaccctgttccttcacaactactgaatgacagctccagctaaaacttctttaccccacttcccgtacaaggatcaattctctgttgaaccaagtcttcagaaggctatggtgggaggattgcttgagtttaggcgtttgagaccagcctggggcaacatcgagaccctgtcactacaaaaaaaattaaaaattagtcacatctaggggagcatgcctatattctcagctactcgggaggctgaggcaggaggattacctgagccyaggaggtcaaggctgcactgagctctgatcatggcactgcactacagcctgagtggcagagcaagaccctatctctaggaaaaaatcaaacccagctccttctaagagttgtctgtatttgctctctcctctgtcttcccattttttagtgctcctcattcagtcttctacattgtcactctgccaaaggtagtcagtaccctgcgcattgctaaatccaacgcttagttctcagtcctcattgtacttgcttatcagtggcgtttacacagtggatggttcattcttccttgacactctctttctaggacgtgagattacagcactcggagtggttgctggtccctcctctcttctgcatcgcctaactttggagacttcagggcacagtcccctgcctcctcttctcttctgtgtctacactcatgctcctggggatctcattttacctcatggctttaagtacaaatcatgtgccagtgattcccagggattaagttttcagtccagagcagtctggtgacctgctgaccccatattcaactgcccactgcatctccactggtatccaatcgacattccaaattcagtatgtctaaggctgaacttccccattataggtgatggcaacttcaaaaactgttggagttatgtttgattttttttcccccatgtccctcattcagtcagacagaaattcatattaagttcttccttgaaaatccacctgaacttgtgtagttctcacaacttcccctggctactgcatgggcccaagccaccctcaccttctgccctggattgctgtgtttgatcttcccatatagttgtctgcctcggccctyggcttcctgcgatctgttctcaattcagcagccagagtgatgcattcattcactcatttatttttttttttttacgagacagggtctcattctgttgcccaggccagagagcagtggtgcaatcatggctcactacagcctagatctcctgggctcacatgatcctcctgcctcagcctcccatagtgctgggattataggcgagccactgcgcctggctgagtgatgcttttgtaatgtaagttagatctaatcacccctttacacaaaactctgcagtggctctttcactctaaagtaaaagtgaagctccttctcgtgtttgcccttccaggccctgtgtgatctgggctcccatatccttccttatatcccctcttcttcttgctccctctgctcctgtcatatgggactccttgcccgtcatcttcctcagttaaaagtattctgatgtactctggtggtttatatactcttaaaagataatgcaatcttattaattcaaaatgatgacagcttgtaattatcttctgattaatgaattataactttgggtgaattgtttactcaatgtgaatacatttccttatgagataggtcaggttgtctatcttccccaatccttggtcaactcacctgcctgttagttatatatatcttatataaagataatattctgatagaaaacatgactttagttttacagtaattctctctctctctctatatatatatatatatggcaaaaaatatactgcaagacaacttgaagttgctcaaagcatcagagtatctaaaagtgtgtgtaaaatacataccatctcagtgtgttgcccagggctactaaagccccaagaacataccctgattgtaagtcgttagaggggaaaagcacatatacctttatctgtaaggacaatgataccaggtgcagtggtgtactcctgtagtcccagctactagggaggctgaggtgagacggtcctttgagcccaggggttcaaggttgcagtgagctgtgaccgtgccactgcactctagcctgggtgacagagtgagacctcatctaaaaaaaaaagaaaagacagtgagacagtgacatatgtttctcctgcagtgtagcatgggttcaggaagatgatcacggcatattatttaagtccaattaaataactcagtgatctcaaagcatatagtttttatctttaacaaaaagtaagtggcacatgtacttatcgtctagtatagtgtggatagagggaagcccgctacagcacatttaaatcccatcaaataaataagtcagtgtagttaaattaagattatggtcttacatatgagatggcttaatgaaccggctcacagagtgaggtatttatattgtactgaaagcattctcattagtatattactttttataatttcatacagccagaatttgccatataaaattcctctggaaagggagaataggttacaacatttattttccacagagcaggctttggtaacctgtttaaaaatctcaaaacatctttatgtgtctttgcaattagttcctttaattttaagcgcctttcttagcccctaaaatttttgcccactatgtactttctatcatttttccatgtttaggggttttatgttattttaatgttagaaaaccacaatctatcttgaccttctcttataagtttcatacatttatgagaaagttgaaattaagagagtgctcttttgatagaaaagagctgtgtttgggttctccaaataaacaaaaccaataggagatattataatatacatccccacacacatacgtacacacatggagacaggtatatattaggttggtgcaaaagtaattgcagtttttggcattgtagtaaaaactgtgattacttttgtaccaactgacttatataggtgtgtgtgtttataggagatttattatgggaattcactcacgtgattatggaggtcgagaagtccagtgatctgccatctgcaacgtggagaaccaggaaagctggtggcataactcagtctgagtctgaaggcctgagagccaagattatggggtggaagggaaagggctgcagtataagtaagtatcaaagcacaaaggcccaagaaccaggaagcctgatacctgagggcaggagaagatgggtgtcccagctcaataagagtgagggggaatttgcccttcctctgccttttggatctatttggactctcagtgagattggctgatgctgcccatgttggtgagagcagatcttctttcttgagtctaccaattcaaaggataatctctttcggaaacatccgtgcagacatacccagaaataatgtcttaccacctatctggacatctcttagctcagtcaaattaacacataaaattaaccatctcaagactgtttatttgtcatttgttgaacttagaactttggcctagtgctccacctgagctgttggggtcaggcttagcatattgttaagacaggcaaacattgtcaatacaagcctttgatgtaatagtatttccctttcaaatctgtattagaaaaacctttactttcactaatcactaaatatttttcattgtatctccaatgccaaacaacagaaagaacatcgaaaacaaagcagaaagacaatattcctctccccyagaaagagacacacacatagttttttttttttttttggagataggatttcattctgtcactcaggctggagtgcagtggtgcaatcatagctcactgcagccttgaactcctgggctcaaaggatcctccctcctcagcctcccaagtagctgktgctatagaggtgcacaccactatgctcagctaacataaaatttttttttggtagtgatggttctttctaagttgcccaggcttgtcccaggctcctggcctcaagcgatattcctgcctcggcctctgtgttgggtcrttctttgcattgccctagaggaatacttgygactgggcaatttataaagaaaagaagtataattggctcacggctctgcaggctgtacaggagcatggagctggcatctgcttctgaggaggcctcaggaagcttacaatagtggtggaaggtgaatggggagcaggtgtatcagatggtgaaagtaggggcaaaggaagtgagtggggggaggtgccacrcttaaacaaacaggtctcactacaactcactcactgtcttgaggacagcttcaagccatgagggatccacccccatgatccagtcaccttccaccaggtcccaatttgggattacaattcaacatgagacttagaggggacacatacctaaactatatcagcctcatatgtacatacataaatctcyatatagaagattgagccagttatcattttattgcctcttagctccaaattcatacttcattgtctgcactatgaagatagagctaggccctttaagtatttctcttttgctgctggcctgacgttaagttttgtcagatgagggcactggatgggacaatgcaagaggaggcggaggcatctcttccttattcttgtgttttcttatttgctttttctttctcctttcataggatttctaacagcacttgtgggagtatccagtggtagttatcctctttgagttttagtgacacgcccatgggcagactcccagtgagtcttgtgggcatcccagaggtcaacttcctagcctcaccctgcctatgtactggagggggtgtttgcttgacagttcctgtcactgttatatacacccccaggatatttctggctttttagtcctgctatgccaggactaaaaatggtttcctgcctgccagcctcaaaccatctgtatactggagaagtgtttcctgcttgctagtcccaggcacagtttcttgtccacttgcatcctggaggtgggtgtttcttgcctgctcaatgataatggagaatctttggcccaaggaacccaaccatcttgtgagctgcaaacacacgttctcctgtgagctctgagtcttagccttggggagggagtcctcttccaaggttgttttctccttggataacaggaaaaaatctccttcagtcctaggtattctttagagttctctctgactttacagataagcccctgttataggtaataattatttatattaagcttctctgttcaaattactgcagagctcctgtctccaggttggaccatgactgatgcaaacataaaaggcagaaattagggtttgataaatcactagtgttttcttcagttttacggaaatttagtgcacttaaaaatctatagatttatgtgattataactgcctttccaccttgggtgttctccaacctagaatgtacccttgcaggttctgttttcctttttcagatcctagctcaagtcctgcaagttccagtatagccttttctttttctttcttttttcatttttttttttctttttgagatggggtctcactctgatgcccaggctggagtaaagtgatgtgattatagtcaccacaccactgcagcctttacctcctgggctcaagtgattctcctgcctcagcctcctgagtatctgggactacaggtgtgcaccaccatgcccgggtaatttcttaaattttttatatagacagggtctcactgtgttgcccaggttggtctgtaactcaagcaatccttctgccttggcctcccaaagtgctgagaggagtgagccactgtgcccagcccccaatataaccttttctgaccttcaatgattggtctcatctttaaattattacagttcttgtacgtatcaatcaactgacccttgacatattttagttttgctgtggtgctttctttttttttcagttataaaatatgcaaattaaaaaatattgctttttatatactggagaattttatgaaataattttattgaaatgcttcacctgcatctttgacagtgtctattccatgtacccaaatataaggtgagattttttttcctccttaaaattctttctcagagaagagagagctgctttatattgaagttcttacaaaatctcttataggtaactttctgttatttcacttactcaaaaatttgttgaatggagaaggcacattgttctcatataacctaaattcaaaatttttgggtatggttttagaggccacctgacagaattgttttttaaaaaaggacactattcatcaagacaatgggagaaaaaaaacgttgcaaagaagtttaagccagatttaattattattccttagggaaaggttgtgacctcacatttgccaacgttaaagatacttaaagagtagcttagtggttctgttgtagagataaaaactatacagttacaggacaaatgaaaaaccgatcagttttatgtagatttcccatgacagcatctcacgaataatcaaaaatatgctccatctcaaacagcttatagcttatctagaaatgaaaatgatrtattttaactctgaaatttaaattatttacaaagttattgtaaataatttaaataaaacaatttcatgaaatatgcaagtggggcccaaacctaatatctaaattaatatattttacctcataggtaatttaaggtatgtgttcctaactaaactgcaatgtaaattttagaagcaggcatgagcattttatcaacatctgtaaaagtcaattagatatttgaattattagacataaacagatgttaataattaattaggtatgtatttcattgtcacattaaatgttcatgtatttatttgaaagaaaatgtgttttggatcttttcttgggcaaataagagagccttatatttaggattgctttatgttggggcatattctgtgtcatctaagatgataagacctctgggggcagagatagtcatatattctataagttgtatctccagtgacaagcatagtaccctgaatatgagaactcagtaaatgttgattcttaggaactttgcctttaaagagggtcttagtcagttttgtactgctataacagaataccacagactaggcaatttgtaatgaacagaattttattggctcacagttctggaggctgggaagtccaagatcgaggaaccagaatctgatgagggccttcttgctgtgtcatccatggcagaaaggcaaagagagggagaagaagactgactcaccttcatataatgaacccattcccaagataatgagcccactcctacaataatggcattaatctatccataacctctcactggcctccacctcccaacgctcttgcattggggtttaagtttctgatacatgctttttaggggacacattcaaaccacagcaaagacctaactcaagtgtttacttcttttctgaagactttcctgatgtcttcttcgtcctttgcaggaattgaccacttcccttgccattgccgcagcactctaaccttgtcctggacttacgaatagacctgtctgtgcttgtctgctgcactgccaactcctgaggacaggagctgtgactgatttttcttagatctttagagccttgaggagtgtttcattcatagctaccataactgtttactggaatcaatgagtttgaatgactacagagtatagggtatctcattgtctcagttcttgcccaaagaccaagtagatttaggtaaattcttaaaaaatatctgctgctatctaaactctcatcatttgcccttgaatctccatgacccaaaccatttggatttcacaaaactcttcaccattagaactttaggaactgagtataggagtattttaaaaaacatgttaaaacacaggccccattttatgcatggccagagatggtttctagggcccttataattcatttgagtggaagtagttgtctatattatttaccttcatggagactgcacacggctctggcctggtggctcctttaatcatgtctttaatttctggttggcactgtgctgtcttttcttgctgtggtcatggttaccagatgtggtagttgaagggaaggtacggctcttgttactagagtgccaaactgtggtgggatattagttaggattacataaaactagtaaaaaccagagaactctggtttatgagcttctgctaacagaaaaattattttttataaaaacttaaatataatatggcttattcccacaaaatgtaagcagtacttgggtaaagttaacactttccatatgtaaaagactagcgtggttttatttctgagtatggtattgtatccaattgcaatatacagctaagctattgtttgactttgaaccattgaattgaaatgacattttcattctagaagaagacatgttaagcaacggactgcctacgctgtgccagccacagggctaaatgctgccatatgaattgctctatagaattcttacaacaaccgtgtttgccataattttttttatgttagcattttattttgagataattgtagattgatgttatgatctcatgtacccctcagctactttcttccgatggtagcatcttgcataattataatagagtcttgcaattaggaaattgccattggtacaatcctttgaccttttcagatttcacattttatatgcacttatttgtgtgtgtctccgtgtgtttgcgtatttagtgctatgcatttttttttttttttttttgagacggagtttcactctgttgcccaagctggagtgcaatggtgtggtcttggctaactccaacctccacctccggggttcaagtgattctcctgcctcagcctcccgagtagctgaaattacaggtgtgtgccaccacactgggctaatttttgtatttttagtagagatggggtttcaccatgttggccaggctgatcttgaacttctgaccttaagtgatctgcccacctcggcctcccaaagtgctgggattatgggcgtgagccattatgcctggccgtgctatgcgattttaccacacctgtaggttaccatttgtttttaaacacatgagggaaataaggctcagttaagttacgtgaaatgctctaagtgtagactttgagtttgaatctagctgtgtttgatccacacttttgctttttctgtaacgatatgattaataacagtaataattatgacaatagctgaaacttactgagtttcatgtgaaatgtattgagtactttttatgtgacagggactgttctaaggtattgagtcatttaatcctcctgacaacttttatcatgtaaattatgtcacagttgaattagtctccttaattaaactgtaagtcatgttaccaaggaataggtaattatttttacaactccccaaatcaataataaaataatgaaatttcaccctttctttacataatttcacattttgacttccraccttaaccactgatcttggccattgttgattactttcatatatataatgaaacctgtattattatagattgagttaggctgagataccttacaaataattttactaaactgtaaataagagctggtgtaggcagaatgccaggattttaagggaatagatgtaaaataccaagaatacttcagaatgtaattgagagaaggttttttttttttttttttttaaagactgttttagctttttttggccaaataaggccccagaaatgtttcaatttaatcagatctcccaagttatgtatcttaattttcaatatggtacctaatgcctttggttgtaagttatcactgataagcagaattagtatgcttcaggaagataatagatatacgaatcatcagcccataatttactattctttgctagttaaatctcttgtaaagctgtccctgtgatgaacagcagcacttattcagaccaaaaataacaacagtcccatgtgttgtaggtcccaggaggtcttggtgtttttgtagacagcagacaagaaataaaaggaattttgtcctttttacctcatgtaatcccactggaaaatgaaacatgtgctatgagttgatattgactcctgccaggtcacctccctaaagagtctcgggcaggcactgttgcaacatttcttggacaggagtgtgacgggctgtgatggagatggatggtttatgtagtacgctaccgtggaacactgcactactgtctgcccctaggaagtggctagtgaggacgccacgagtaacccgcatctgttactttaactctttcagagggtattacataagctttacatcccccaattttaaactaagttctacgtagcttttttttttttgatagttgactatagtaatgtagaaccatttatgatttcttttcccgtactttgtaggactttcttttggatgttagataatgcaagtatttttgaaactatatgttattaggaactatttggacactacaaaacccttttaatgggccaccctatcaattctctgttcttctaaggaagtttttcctattcataactcatttcactctttggctcagattgagggaaatgtaataatgattaaggaaaggaatgtatgcgttttcttctttttctgaaaacctgtacacattttctgtctcggattatgtaaacttggagggctgtagaatgttgacaactgtgagaggtaaaaatgagtctgttaatacataccactgctttggaatttaaaagccagaaaattcccctttggttctttggagaagtgtttagcttgatggcccagaatacaaatccagtaaaattggcatgttccagctgtcatttacacacaccttaggcgaaattaatgagatcactctaagattacactttgtgttttattttcattttataggtctgtatgagctgttggctgctctgccagcccagctgcagccacatgtggatagccaggaagacctgaccttcctctgggatatgtttggtgaaaaaagcctgcattcattggtaaaggtaaaccatgctgatgtcagattctctttgcgaaaagcatatggaaaaatatttggggcaccaccaagtaaaccagagatcaaattgttgctctctgaaaacaaaacagccttgttccattcaccgacgggcgtggaagttgttaaagattctaccaaaaatacatagatgatttcacttaatggtggtgagctggctctgtatactaatgtagcaaccatgtggtcacccccttgtttagagaaagaatatgaaatagtagcaggaaggtttagactcttttacggtcaacattcatgagctggaatttaacttaaataaatgttcacagcaaaaattagaaggaatctattttctgaggtcaaggatggcagcagttcagtagccacattaatttaaaataatttcctttaacaaagtcaactgaaattctagtaagctgttccttttattggcagaactccattgaagtggtattttgtatataaatacactgaagccgaatgtgagtaaaaacagtttttggagacagttttagtaaagcatcatgccrtgaaaatgatcagccagcagaaatcgggtctggccatacagcaacattgggagtgatcagaactcctaaaatagtaaaatgagaacaagaagcttactggaaaatatgccacttgtgcttctggaaatatgaattgcattttctctcatctaactcaagctgaaagaaatttagagtctttctggagtttatgaggaggtagaaaccagtgcctcaatgataactggacctatatttttaaattcagctaactttgttatggctgcctgtcatgataagaggcttttaattgatatagagtattagaaaatgagcaatttctgagttgcaattgcttttcagaacagaattcctatatttcttttgtcaaatttactgaaatttgtgtacttgcagcagtgacaattcttaagaaatggaagtgttgatatgtggcatttccctagcagtacatttaaagaccatgtttatttgttcatttctttattttttcataacagtgtaatttccaaggcatccttgtgctctaaataatagttgccctctggggatttattaggcatggtcttgggattataactgatgacgtttatgacttggtaatacaatcataaaaatatttttaagttgactgtgtggaagttggatagctatgggtttatttagattgagttgaccttttgatagcaggaataaaatatatttgaggtgtcatcatcatcctttaatcattaaataagcatgcctccaaacaatggatgcatattcatttgtatgtatttacaaatagctactatctcagtttccttacctataaaattaaagttataatatctgtttacagggttgtttgtgagtttcaaataaaatagcgaagatctsagttttttggtagttatataatggggttagacaaatttaagtaggcattattaagtattgaggaaaaagttaattatcrtagcacgctaaagaccaaaaaggaactacagagatggttgttatttctattaaaagaatgaaactaatgcataaaacaaattcttagttacactggcttgagttttaagctgaggctgtttttcaaagtatatgtcaatactaagtggttagaaagcatagcggagggtattgatatctgatttcataaaaacagtggagcgaataaactcatgttgctagtatttagatagcacaataacacatgtactattctaaatgttttccagtaattgctgtaaaatgtattttcaaaattagttttattacgtacctctagtacattctcaatgtcttaatagttcctcccacccccaacttttatcagacacagacctcaagtgtgtcctttgactgacccattctattcgttttcaagtatgtaaagtctgcaatactttcaggaggcaggttcctgggactggagctttaaacagctggaacaaaccgcttaactgtattccaagcgtgtctatttaagcttggaggatagaagccttcagcttttgtacgtaaatcttggtagagctgaaggaatttgtatgaaaagatttgtggtagagtgaatcaaaatcgctttggttttatgctcttctgcctgcagtcgaagctgttagaatgtggtttagaactgagtgaacacaaaacttgattttattctagtacagaattttcatagttgttatcgtgtgatcgtgtgtgtgtgtgtgtgtgtgtgtgtttaaatgggctgagtgcagtggttcacacctgtaatccgaggccaggagttcaagaccagtctgggcagcacagcaagaccctctctctcaaaaaaaaattaaaaattagccaggcatagtagtgtatgcctgcagtcctagccactcaagagtctgatgtgggaggattgcatgagcccgggaggtcaaggctgcagtgagctgagatcacactactatgctccagtctggatgacagagactctgtctcttaaaaaaaaagtttgggggcaggttgtaaatcacaacacaattttaaatacatagacctctttggactaggaaaaaatatacttataaagaggaagtttgagtaatacagtctctgtgacagattcagccaccttggggtatctggctacagtgcaagtatatgtaggctgggagcttgtcactaaaaaggaaatatggtgatcctctagggtgttagctgaggatgctttttaaaagaaaaacgcctaaatagaaacgaagaataataaaaacggtgagcatgagactttagaagtatcagagggaagatgatactgagagaatgcctgagaagtctcatattgatatggtttagctgtgtccccatccaaatctcatcttgaattgtagctcccttaattcataygtgttgtgggaaggaccccgcgggagataatcgaatcgtggggggtggtttccctcatactcttctcatggtagtgaataagtctcataagagctgatggttttttaaagggaaaccccttatgcttggctctcatcctctcttgcttaccacgatgtaagatgtgcctttcgcctctgccatgagtgtgatgcttccccagccgcatggaactgtgagtccattaaatctctttttctttataaattacccagtctcaggtatgtgaaaactgacaaatacacatatctgtgggatggaaatacattgtttatgagggtggaaatagaaggatatcagaattcacatgaactagggaatggcatagaccatcagcaagggtagagctgcatccaggacccatctcttgcaaatatccaggaccatatattttgtatcccaacctcatttctagatgtagtttctattcttgtggattcttttttcctattgagatctctttacttattttacattttattttttttagttatgtttctgtrtgtttttgtaatctggtttaagttcattttagaacaagatatggcacaaaaacttgcttaaatactatatttctttctttcttttttttttttttaaattctytgagacagagttttgctctgttgcccaggctggagtgtaatggtgcaatcttggcccactgcaacctctgcctcctaggttcaagtgattctcatgcctcagcctcctaagtagctgggactgcagccgtctgtcaccagtcccggctaatttttgtatttttggtagagacagggtttcaccatgttggccaggctggtcttgaatcctgacctaagggatccacctgcctcggactctcaaagtgttaggactacaggtgtgagccactgcgcctggcctatatttcttttaaataaggctgtagttctgttttctccagaaatctttgtttttaactcacaactatgttagatttctaggataagaatatggaattgttagtaccttttaaatggttgtgttatgtttacccctaccctttaaagtaattgtgtgtatatttgggaacaggaggaaaaartgtagcaatctgaattttattctttttggtattttgaagtatttcaacaaacccaaattgrtattttccagataattttcctcatatgattgaattattgtgtgtgtttctgtgatttcagccttatacaagtaatgataaatactcagacccctgtaacatctggttacattgttttagctttgcatattttttaattttgggggttacatagtaggtatatatttttatgragtatacaatatattttgataccagcatgcaatataataatcacatcagggtaaatggggtatccatcacctcaagcatctatttaactttgagttttgatggactgattgatactatttgttgggtacatactctatgccagttactatatggaccactagggccaagatgttcaacttggtgggcacaatcccttgcctgtgggggctccagtctcccagagagtttataaatgaagggatggatgattacagtattctaagataggcctcatttggagctttttaggagagacacaaggtacctcactcaacactagcctcagagggggcggttcatggaggatttggtatcttaagttggaacctgcattcggtataggagttgctcaggttaggctgggtgtggtggctcatgcctgtaatcccagcactttgggaggctgargcaggtggatcacttgaggtcaacagttcgagaccagcctggtcaaaatggtgaaaccctgtctctactaaaaatacaaaaattagccaggcatggtggcacattcttgtaatcccagctgcttgggaggctgaggcatgagaattgcttgaacctgggaggcagaggttgcagtgagctgagatcgtgccactgtactccagcctgggcgacagagcaagattccatctcaaaaaaaaaaaaaaaaaaaggaagttgctcaggttagagtttatgggatggatgagggcatgggaggtcaggcagaaggaataatggatgcgaacacctggaggcaagagcgaacaatccacctttaggattgaggtcaacagattgttttggctgatctgtgacaccaggaaggctgtgggcagccaagggtggcaggagagatgaacagtgacctgttcttgaatagctttgtaaacgacagaaggtaaatgggctttcttctaagagagtgggaaccattgcatggaaaggtttcaagaacagtgaagatatcaggtttttcttttagaggtaaacagtgaagactggatgggacatgagattcccaggtcagagatgatggtggcaaagtgtwggaagagccactgattttagtttgagagagggaggctgatgttcagtgtgctctcatctgcctgtgggctcttcattgaaatatgaaactctcctgttgtaagccaccaactattgtttatgccaggccattgcgggttggaagaggataccaggagacctgtataagccctaagataccaataccaggtaccagttcttatatattttgaccatctcctcagaggagatgagaggtaattttagttttggttatgtttgatatctggggcataatcaaatagagctacttattggatgtgtgaatctttttttttttttttcgagatggagtctcgctgtgtcacccaggctggagtgcagtagtgtgatctcggctcactgcaacctctgcctcctgggttcaagggagtctcctgcctcagcctcccgtgtagctgcaattacaggcacctgcccccacgcccagctaatttttatacttttagtggagatgggttccaccatgttggccagggtggtcttgaactcctgaccttgggtgatccacctgccttggcctcccaaagtgctgggattacaggcatgagccaccgcatctggcctggatatgtgaatattgaactgaggataattatgttctggattggacagaatagatttgggagtaggggtgccagataaaatgcaggacatcctcttacagttgaatttcagatatgcaatgaatggtctttgttataagtgtgaaccatgcaatatttgtattttcattactgaaatctgacagctcttatttgggagtcatcaacgtttagaaggtaacattcttttgggaacagatttgttgagctatataattcacctactgtcaaatcacccacttaaaacatacaattcagtggtttttagtatattcacaggattgtgcaaccattgccaaaatcaattttatttattttgtttattttgttcttttcctatccccacaatcagttttagaacctttttatcacctcaaaaataaatccttcacccctagccatcattcttcaatccttgcattctctctcccatcccatccctaaacaactgccagtctactttctgtctctatgtatttgcctatcctggaaatttcatataaatggcatcatctgtggcttttttgtaactgacttctgtcacttagcttaatgttttcaaggctcacccaaattatagcatgtatcagtacttaattcctttttatgactgaataacattgtatggctatatcacacttcgttcatcctttcatccatggatggacatttgggttgtttctgcctattggctgttatggtgatgctactaagaacatttgtgtataagttattgcatagatgtatattttcacttctcctgggtatgtatctaggagaggaattgctaggttaaatggtagctctaagtttttatgaagacctgttagactatttttctaagtggctgaaccattttatattcccaccagcagtgtataagggttctgatttgtctgtatcttcaccaacatttgtttttatctgactttttgattcttactgtcctggtgggtatgaagtgrtacctcattgtgattttgatttgcattttctagatgtctaaataatgttaaccatcttttcatgtgcttattggctatttgtatgtcttctttggagaaatgtccaattggatcctttgcccatcatttctcccattggattctttttaattaataaactttactttgtagaactgttttggatttacagaaaaattgagcagatggtacagatagctcccatatcccccttctccccttcccagtttctcttattatttacctcttgcattggcatggtacatttgtcaattaacgaaccaatgttggttgatacattattattaattgaactccattatctacattaaggtttattctttgtgttgtatacttccaggttttgacaaatgcattatgtcttgcatctattattacattgtcatgaagaatagttttacgtttccaaatctcccatgctttacctgtcctccctccccagctcagcaatcactgatagttttactgtctgaatagttttgccttttccagaaggtcatattgttggaatmatacagtatgtagccttttcagattggcttcttttacctagtaatatgcatttagggctccatcaagtcttctcatggcaacatagcccatttctttactttgtattgctgaataggatttagttgtagataagcaccatagtttgtttctccattaaccttttgaagggcatgttcattgcttccagttttgagcagttacaggtaaactttctataaacatttgtgtgcaggtttttgtgtagatgtaagtttgcaactcatttggataaatatcacggagcacagttactggatcatgtggtaagactagctttttaagaaactgctggccaggtgtrgtggctcatgcctgtaatcccagcactttgggaggccgaggcgggtggatcaccaggtctggagttcgagaccaktctggccaacatggtgaaaccctrtctctactagaaatacaaaaaactagccaggtgtggtggcacgcgcctgtagtcccagctacttgagaagctgaggcagaagaatcgcttgaatccaggaggcggaggttgcagtgagttgagattgtgtcactgcactccagcctgggtgacagagtgagactctgtttcaaaaacatttcaaaaacaaacaaacaaaaagaagctgccatattgtcttttaaggtgactgtaccatgttgaattcctaccagcaatgagtgagagtccctgtagctctatagccttgtcagcrtttggtgtggtcattttttttttttttaattttagccattctagttggtgtatagtagtatctcattattgtgtcaatttgcacatggtaggttaagcatatcttcacacgtttattttttatctatacatcttctttgctgaggtgtctattcagattttttgcttatttttatttttatattcctgttgttgagctttaacaattctttgtattttctagatgcaagtcttttatcagatatgtatttgcaaatattttctcccagtttgtcttttcattgtcttagtggtgtctctcacaaagcagaagttccacattttactaaagtctaacttacagattttttctttcatggattgtgcttttggaattatatctaaaaactcattgtcaggccagtcatggtgrctcacgcctgtaatcccggcactttgggaggccgaggcgggcggatcatgaggtcaggagattgagaccatctggctaagatggtgaaaccccgtctccactaaaaacataaaaaattagccagcagtggtgacgggcgcctgtagtcccagctactcgggaggctgaggcaggagaatggtctgaacccgagaggcagagcttgcagtgagctgggatcgtgccactgcactccagcctgggcgacagagcgagactccatctcaaaaaaaaaaaaaaacaaaaaaccaaccaaacaaaaaaacccaaaaaaactcattgtcaaactcaaggtcacttagatattcttgtgttatctcctagaagttttacagttttgcgtttacatttagctctattgtccaccttgagttctatgtctagattaaaatgtctgcatatgaatatccaattgttttagcatcaattgttgaaaagaccattctttttctattgaattgcctttgatcctttgtcaaagattagcttctatatctgtgggtctatttttgggtaattgtgttccattatctatttgtttayactttcatcaacacatgctgccttgattaccttagctttatagttagttttgaagtagggtagcgtcagccctcagactttgttcttctttgatactgtgttgactattctgaatcttttgccttgtcatataaactttataatcagtttgtcatatccacaaaataatctgctgggattttgattgggactgtgtattctatggctccatttgtgaagagatgacatcttagtaatattgtgtattcctgaccatgaacatggaatattcctcaatttattgagatcttgtttgatttcttttaccagagtttgtgttttccttatttagattctctgcacactatattttgttagatttatacctaaatgttttattatttttggtgctatggctttggagtggtattatatttttaatttcaagtttcagctgttcagcactggtatacaggaaagcaattgatttttggatrttaagcttctgtcttgcatccttgctataatcgtttgcttgtggccaaggtcttttgctgttgttgattctttgggattttctcatctgtaaacaaagacagttttgtttatttgttctcaatctgtatatatctttttttgtcttatagcattagctaggaattctcatatagtgttgaatagctgtggtgaaaacagacatcttttctttatactgatcttagggaaaattaagtatgattttagctgtaggtattttatacatgttcttcatcaagttgagaaagttctttctatttccagtttgctcagagtttttattgtgaatgggtactgatttttttttttttaaagrcagagtcttactttgtcacccaggctgcctctggggttcaagcgattctcgtgcctcagcttctcaagtagctgggattacaggtgtgcgtcactacgcctggctaatttttgtatttttagtagagataaggtttcatcatgttggtcaggctggtcttgaactcctgatctcaagtgatccacctgccttggcttcccaaagtgctgggattataggcgtgaaccactgcacccagccttaaaaatatttttgcttctgttgatatgatcatatgattttcttgtttagcatattgatgtgatagattacattaatttacttatgaatgtttaactagattttgcagacctggaatgagtcttatttggtcgtggtattggttgaggattccttatccaaaaggcttgtgatctgaaagaagtgttttagattttagattgttttgaattttgggacatttgcagatttttaactagttaagcatccctgatttgaaagtccagaatctcaaagtgctccagtgagcatttctttgagcatcatgtccttgtcagcactcaaaaagtatcagattttggagcatttcagatttcagagcattttggatttcaggtttttggatttgggatgctcaatctgtatataattaatttgatctattgctgggttcaacttattaatattttgttgagtttttttgcatctctgtttgtaagtacggttagkctgtaattctccttccttgtcatgtctttatctggttttgatawtaagataatgctggcctcgtagaatgaggtaggaagtatactctgcttgctattttccttttctttctggaagagattgcagagaattggtataatttctcccttaagtgttttgtagaattcaccagtgaagccatctggacctggtgcttgctgttttgtaagttaactagttattgattcaatttatttcataaatataggcttattcagatttgtgtttctccttttgtgagattttgtcactcttgtctttcaaggaatggtgtatatcatctaacttatcaaatttgagrgcatagaattgttcatcacaattctttattgtccttttattgtccttggcatcagtactgttgactcctctttcatttctgatattcgtaatttgtatcttatctcttttttccctggctatagatttatcaattttattaatcatttaaaagaacttgcttttgattttgttgatttttctctgtttttttttgttccagtttcattaatttttgctcttattgtctgatttcttttcttctacttgctcttctttttctggtttccaaaggttggaaagttagattatcaattttagatttttctttcttttgaatgtattctttcagtggtataaattctaaccactgcttttgcagcatctcacaagttttagtaagttgtattttcatttccacttaatttaaaatattcttgagaattcttctttgacccatgtgttatttaaaatgttgtccaatttccaaatatttagagattttcctgctgtctttctgttactgatttctagtttaattccatgtggtctgaaagcacatgctgtatggtttttgttcgtttagatttaagttgtgtttaatggcccaggatgtggtctatcttgctgaatggtctatgtgagcttgagaagaatgtgtatactgccataattggataaagtattccataaatgtcagttagatttggttggtagattgtgctgctcagttcaactatatccttacagatttttttttttgcctgccggatctgtcaattactgactgatagcgggtgttgaagttccaagtataatagtgacttcatgcatttctctgtagttttatcagttttgctttatgtcttttgatgctttctttttaggtgcatacacatttaggattgttatgtcttcttggggaattgatgcccttttcattatgtaatacctttatctctgataattttttctagttctgccaatttgccatgttgggaattgacatatgtactccatcttttttgggttaatgttagtgtatctttctctacttttttcttttcgtgtgtctgtatctttatgttcaatgtgagttttttatagacaacatatagttgggagttgggtctttctttttatscattctgacagtctctgttttttaattggtatatttagatcattcacatttgaagtgtctgttgatatagttggttaatatttaccatatttacaactgatttctgttcactgcacttgttagtttctaagattttaattatcctgtcttttccttccttctctgcttttagttgaccattttatattattccatttactctcttcttttatcaaatcaattatacttaatttttttttttctatgtgtgcttgccckacagttagcaacacacatttacaacaaatacaggttttgtttttttttttttttttttgagacagrgtcttgctctgtctccctggctggtgtgcagtggtgttatctyggctcattgcagccctgatttcccaggctgaagtatttctcccacttctcaacctcccaagtagctggaagtacaggcgtgcgccaccatgcccagctaactttttttttgtatttttttgtagagacagggttttgctgtgttgcttaggctggtctcaaactcctgggctcaagtgatcctcccgccttagcctcccaaagtgctgggattacaggcataagccaccatgcctgacctaggtctattttcagataacactgtcatttcacaggtagtacaggtaccttataacagagtattctcaattccctttttcctatctcttataacatttctgtcattcattttacttatctctatgctaatgtaatcccccagtactttgctaatattattactctgaacagttatctattagatcaattaagaataaaacaaataaaatattttgctttatatttatttattttttctctgatgtccttccttttttttgtgtagatccgagggtctgacctacatgattttctttctctctgacaaacttcctttttaacacttcttgcaaggcaggtctactggttgcaaattccttgagtttttgtttgtctgaaaaagtttttatttctccttcacttttgaagtgtaattccattagatacggaagtccagactggcattttttttttccgtcaacacttaaaatatttcagtccactctctttttgcttgcgtggtttctgatgagaagcctgaagtaattcttatccttgtcctctagaggtaaagtattttttccctcaagcttctttcaagatgtttgctctctagcagtagtcttcaatgggctttacttctgaacttgaaaactttacaaattcaactaaggtaaactttgcttactattttggtccttttcactcaaagacatggaagccttatcagaggcctccatattcctcagtagatgatctcatgataatgttatgattaatcttttttcttttcccctacaaatggaaaagtcctttgtctattagcctattataagcacaggagtacatatcatgcgacttggaagtgccatgataacctcttaattgcctacccctttaccttaataaagatgaacacttttttcaggtaagataaattcctagttttattagctataatttaaaaggaatgcccactatttaatatcaagagtaatttttaattcaaaatatacaatttatcttcttaaaaatgccctgaagtcttgtttttaatgaaacctatgaagtcgcgggcatattagtcacctaggagaagtgaagtatgagagatgacacttggtgggagtttattttgaatctccatattaatatgaattcgtaaagttaaattaatgctcatgaatttaggttgaattctcaaagggaaaaatcttcttaatcttgagtctaaataaatcctgaacagaggctcatagagcaacctgtgaacaagaatatacttttgaagttttatttctccaacctggaaatttcagaaagtgaaaaaccagtttgaaggtaattcttgatcttcatctttcaataactcagattttcttactaaaattagcactatgagatttgcatagaaagtagttatttccaggataatcgatccagtcaaggtattttaaaaagagggataattttattgaggaatggttttataaactctttttggttcaagcacttttaagttcctcaccttttaatctagaagcaacaaaaagcatcatacttgcgggcaaaaggagatatttrcatattagtgaatcagattcaaggctgaagaactattaatattttataagatactcatggaataggcccttttagaaacagtgctgtttggggaagggagaggtggtattaagtttagagagtaaacccaytggggaggttacgttacttgcctctgacatatcatttgctttgggtgggaggaaaaacaaaaagacagccagacattgcgaatgatccatggccacctggtctgacagagcggagacttgggtagcagcagctggtaacgctccttggccaatcaaaggtaattgtcaggccagctctgttggaaaagccagatgaagttatttcttacgttatagtttacattttttcaggcacagaaacatgtaaagtctgctgaagaattcctgagaccctgagtaaattgttgcctttgtaattcatactctaaaaatggtggccatatgttgcccttttcagagatttccttgagagtaaggatgagaaattrggagccatatttgtgaatatttagtgcgrctgtgccctcccgcgtggtctacatttatgtaatgtaacagtcaagttattgtgagatttacatggtgattcaaatatacttagtttcagaacaaccgtcttatatttattcataatttcgtaataggaagtctatatgctctaccagaatgaatgtggggagtttcttacctagaaatctctgacttaagaacagttcattcattagaatgtatggaatcaggaaatttgtaacacttatttcccttttygggcaattcctgctgttctctaattccagaggataggaattccagtagggaaacatctagcttctctaggtattatacctaacagtggagtctctgggctacagagatgagcgtttcccrctgcagtaggtcttaaccaaattsctctactaagtgaattgactggctcagtgaaatgtatatttacaattctgggaccttgggtcatctccctttatcacccgcatttctggattgtgctrtttttggatatctggctttaatgccatgacaggtggcacttcacgtcctattgccacaaaggtgttgggcagtgcagtgtggtcctgacattcccagttggttctcaaagtccatttcccacagcaaattrtagaaccattggcagcaaataaacctccaatgtttgttttcatctatagtaaaatgattttaaaacgtcacagttcttgccatctacaacttccttggaggctatccttgttttattttatttaaagtaaattatttttaaagtatagaactgaattataataatttcaaaataggctgttttctctctctctctctttctttctctttttttttttttctgagatggagtcttgctctgtcacccaggctggagtgcagtggtgcgatctcagcccactgcaacctccacctcctgggttcaagcgattctcctgcctcagcctcctgagtagctgggactacagrcgcctgccaccatggccagctaatttttgtatttttagtagagacagggcttcaccattttggccaggctggtctcgaacttttggcctaagtgatccacctgccttagcctcccagagtgctgagattataggcgtgagtcaccactcccggccaatactgtatgcttctgatggaagtcagcatgaaagtgactatcagagctttggaaatgacaggacgaataactcaaattgaacaagggagtgctgtgggatctgctgtgtcaaggctgtgtggaggctagttcacacttcttgtggttgtgtaaaaaggtatacaggaatacacattctgcataaggaaaacttagtgtcagcatggaatttcacatgatagatttaaacatgtttttgtgggctggcttggaggcctattcaccaccacatttaattatatttctagagcatgtgtttgaagatctaagaaaaaaataagaattacgagcacactttttgtgtaaactctgcttgatttggagtggagggactggataatattcactgaagtgtagtttggaactttaggcctttggttaataatcatkaaatgattggatgtgtgagtgtaataatgtatggctgaaggagacaggtaatttctagagagaggacaacgacttccatgattccttcacatcaaattgggaccttttgctgtctgcatcctgttttcttttgagtctagtgatcatttgcttctcattgagtctgtctattcacccttttgtgttgtctcagttatggacagtcaggtatattgagtacttttctgtgcttccagaaactcatgtcccacccttttgcaaagaggcaactgtagtcagaattcagagctggcattgtgagccacattgcttggactcaggttctggctgtgccaagaataagataataacttatattattatcataataatgtaacaatatacaattatatttatcttaatatatcatattatactatattatatcatataacaacataataatttataacttattttcatcataataattacattattaaaaaatatataatataggctggtctcgaactcctgaccttaagtgatccacctgcctcagcctcccaaagtgctgggattacaggcataaaccactgtacctggccaatgatatatttatgattataaatactatatatgatataataattacatattaatatatcaattaataaataatatattaagataaatatattatattattacattatgatatataacaatataataacttataataatttgaaagaacttattttatattacattataaaaaatcataaaaatcataatatattaagttaaawaatagatatgtttaccttaatatattaatatgtaatattaatatatattaagataatatctatatataaataatataytaatgatatatattaattatattactatatattaggataatatcttttcattttggagacagagtctcactctatcacccaggctggagtgcagtggcatgatctctgcttactgcaacctctgcctcccaggttcaagtgattcttacgtgtcagcctaccgagtagctgggattacagatgcccctacaacgcccagataatttctgtatttttagtagagacagagtttcaccatgttggccagcctggtctcaaactcctgacctcaagtgatctgcccacctcggcctctcaaagtgctggaattacaggcatgagccaccatgcctgaycaagatagtatcttaatatattaatattgkaatatattaataatatcttgtgatatatatcataataatatattaagataaagatacatttaatatgtaaagatatatattttaatgtataaatatatttttatatgtaagatatatatcttaacatgatggaatatatctaatatgtattttataataatatgttaagataaaggtatatttaacatataaagatatatatattttgatatataaagacatagatcttaatatatactaagataatatatctttatatgtaagatatatatcttaatatattgtctttatatataaatatcttcttattttacttcacagtgcctcactttccttatatattagtgtaaaatgacgataataatagtacctactttgtgtggttgttataaggatcaaaagaattgatagatgaaatgtgctttaaatattgtctggaacatattaagtcaccatcattatcatcatcctcatcctcaatttctttctttctgttagctgtgttccatgctatacgccaggatttgcaccattttcagtatccctttggctacattgctgctttttcaggatgatagtttcttgtcttaacaaacttgtttttttttgagatagattcttgctctgttatccagcctggagtgctgtggagcgattgattatatgccactgcagcctcaaccttttgggctcaatgatcctcccttctcagctttccaagtagctaggactacaagtgcacaatactgtgcccagctaattctttattttttgctgagatgaggtcttgctatgttgcccaagctgctcctgaactcctgggctcagcagccctcctgcctcagcttcccaaagtgttgggattacagccatgagccaccacacctggcctcttaataaacttttcttctggcytttttatttctttgctctcactcttttaaaattacagtgaaaattaatagtctgtgattagaaatctttaaaaagttcttgagttggctaagtgtgttttctaacttttctttcccttaaaatgttatgaaatattttgggcattaaaaatgagaacaatatactgaacatccatgtgttccaacacacagcttaagagagaaaatattgtagatccagttgaagtctgaacatccctcctgttcccattcttttccttttcctgccagtgataaccttcatcttgagtttgtattcacaatgtgagatattatttcgtctgttttaaaactcttataaatagaatcatatttacatgacacattcctctttcctcaacttgctctttttttgtttgtttgtttgagatggcgtttcgctcttgttgcccaggctggaatgcaatggcgtgatcttggctcaccgtaacctccacctcccaggttcaagcgattctcttgcctcagcctcctgaatagctgggattataggcatgcgccatcacgcccggctaatttttgtatttttagtagagatggggtttctccatgttggtcaggatggtctcgaactcctgacctcaggtgatccacccgccttggcctcccaaagtggtgggattacaggcgtgagccactgcacccggctcaatttgctcttttgcttaacattttgttaatgaaatttattgtatttatggtgatataaataggtctaattcatttgtttacattgctatctatggcattatgtgactagataacaaatcatctattctcatgttgatgaatatttgtattgaaagttggcttgtgagtacaagagtcatatgtctggaaatcatctttatctccatgtcactattgggaacagtataggagataacttttgtgtggattccccttgtacacacatgcagtcccttctgtaagtaacgtacctaagaatggagttgctggaccataaatatatacatcttacactttagtagatattgccaaattacttttctaacggattgtatcatattataatccaggagttccaattacttcacatttatttcagcattttgaattgttagactttaatttttgccaacttccaatccagaccattaattaaaatacttaccaacaggatcaatttgaaataccataatatctccttgttttagtttatatttatttgaatattaggggttgaacatatgtttgagtcattccagtttcctttttatatcctttgcctgctatttttttttgctttggttatttgtctttttctagttgattcgtaggaattattttgtacattctgatgctggatctttgtttatatgtattgtaaattatctcctggtctgggctcactccactctttccgataatttatcataagtgttaaaacatacatccatgcagaaagtcttctctctgtcttaaatgcagaagcaaaggcatcttcacagactcaccatttaacacaaaatccttattagctcactgggtcttactgaaagcatgtatgagtcggaggtttatatagctcctggccaagtctgaggtctggtttatttttatgtgctggctctagcggggtcctctgggactgtttgaactgatctaatattctcatttggttgtaagcatctatagaatgtatttttagcacctagtctaattatgggtatagttgttcattgagtaaagttcttttcaggcagaatctgtgtatagtgttttttttgtttgtttattctgcgttacctcaaagcgtagtaggtgttcaagggagattgcctgattaaaggaaactgaataacttgcccttccaggctctgtcttgcccagtttgttttccattcatttcacaaatacttgagtgcccatcgtggggcacgatmatasatgctcacatctcattggattcatttattgaagtattatggttattcacaaataattgatgaatgtagtttgatttttcagtcagctcaagttgtggcataagttgcatcatctttattacagacagatgatagttaataaagaaagatatttttatccacctggtttaaaatgaagtttattgttgatatttctgcatgtcaataaaataggaattaggaatgttctatgatgatcacggtttaacaataatagactatcaaaggaaattactgaattagattggttttatcattctttccattttcacgtaaaatactttaaatctttaacattttaaaattgagtatttttaaatgtttcaaaatgttatttaaaatactttattataattctataagacattaatgtaaatctaatttattataaagaacctaaaagtaaaattaataagcttctgtatatgtaaaattagttgcaggtgatccattctgaatcaaaaaattattttatatttatctacccacccatgggtccatccattcatccatccatccatccgtatatcctgcagtagtgctgtttacaggtacatgtaagattgcacttctccacctcttgatgttagttatggccacatgacttgtttagtcaatagaatgtgagtgggagtgaagtgtgtcaccgctgggcagaagcctttagcagtcagtgcactctgtctcttcttcctaccctccagcccccattgctgactgctgatgttccaggtggtgggagttctccccacctgggtctgagcacgtgggcttgtggagcagagttcacagaggaaatgcagtagacagagagtgtctgggggaatataaactttcgttgttatatgctgctaaggtttaggcattgcttattaccacaatattatttataacttaattttaacaagtattttcactatattacrtttcaaatatatttttcaaatatggcttagtgatgtagaaattaaaataaatagttattaacattgcatgaggctaattacttttaggtagttgctattgatctaacagttgcgctgtagaaagttcatattcattttcttgtcaaaacttggtaatttttacattttcttctttgatagacatgcatctcccctctgcaaccactgtggcaaggcttgagaaagggtgatatgtcttgtaagatgtccctgttttacttgattattccagtttaatattaatatattaacccaggagtgtgctatcctggatacttttgatttgtgtttcctttcatcactaataaaactagaagacaaatgtatctacattgttcttagagtcccctgtttcattactacatttcacaattatttttgcttagcaagygagggctatcaatatcaaagtataatacaccccctcccttctgataaaaaactttcctattttttttgaaaggcttgagtgtatcaaatggtgtattttcatatgcaattagtgttttaattgtacctttattttctttctcactttggaagcatagcatctagaattgctttcttcctcattgttttcatttctgtgttcagttaaaagctaaatgaaaggatgttaactgccaactttaaaaatacattttatttgtgaatttcatttgtttaaattggaatgttataaattatacagatggtaaaaatttgattttcattacttgacaaagttggcatgtatctttgtcttttaatttgaataaatatttggctagccactattgtgtgcctagtaaatttaggtagtgtttcaagccactttttaatattatgtgcctccactaggtggtgctcattccttcgggacatctgagacctagcttaaagaatttagttctgtcactgatgggttaaagataaaagaagcaaattcaggccaaagcagtacgaaaaacttgtgaaatttttttatttcatgtaatgagttgtgaaactctgtagtagaggtatktattattattaatgtatgatatttccaagaaatcagtaattttattatatggctcatttatataaaatgtatttaaatagttattatagattgtgttagatgatggggatgcaatggtgaaaaacagacacggtggtcttaaaccatatgactcttggaatcaacactcaagtaatcacttgagtaagtgtgtaattattactgagatagggacaggtttttggtgctttgagtgtataaggggcagagaagggggtattttccaagattctgggaagttttattgaagaactgatcactgatctagttaaataagatctgaaagttgctgaagaattaaccagtgtgagtgtgttggaggagaaatttcacagtgatgaggttagtgtggggttgcaaggagttctttatctgcaccccagtcgttgtaatggttggatccaatggaccttttcagtcctggagacatctgttcttcagctttaatttcttgataatttccttccctcagctcttctcctcttccatctttctagaagttcttttaggtgaatattggcctttctggattttacctttgcttttaaagagatttcttcaacttttactacatttctctttaaaatcttaaaaattcgctgctgctattttaattccagtacatttgagaagaatgtctctgtttcttttttgtaacatcttagtctcattccatggatacactatagaatctttctgaggataattaaacaaaacaaaagccccctttttgttgattctgtgttccatgaacttttcaaagttctaagtaccttgtttctctcttccagcaaccctttagatagatattaatctttaccccattgtaaagattagaagaatgaggtaccactttgattacacagccagttaggtggtagagctggtcttgaacccaggtggtctgactcaagttctacatttttactatcatgctactctgcttgttgatgagtattcagtagaatggtttcggtttcattttcaattctcctcattttgttcacaatttttctttactctgggactttttttttcctgttttgcctgcttggtgtttatcctgtgggggctttcctcaaatgtctgcttattcttggttgtctgcctgtgtttaatagtgagttgttaaaagagctgattggaagatctatgtgttggagcagggcctggtgacaggtggaatctctgtagaacagtggttttcgactgagttggattccttctcgcctttcctggtcatttggcaacatctggaggcatctttgatggtgatgacttgaggagggggtactgctggcatctaggagaacagctcagggatgctgctgaacatcctgcgatagacaggaaagcccctcacaacaaagaactattcagcctaaaatgtcagtagtgccagaacttaaaaactctgcttcagagggaaaggatgaaaaatcagctactgttggttacaggaggagagattgcaaatcccagaataaagagccatttttctccatggctcttcagttttttcatcagagagacctggaatctgctgcctgggccttaggtggctggctgcttgacattctggatcagccaagggaaaggagcccctcacagtatttagggtttcagcacctgcatgcctggcatccctgatccgccagcatgacagtgttccctgggtcaaattgtctcttttaaacaattccccactttgtctggttctatgcggtggcttcctttttctaaaaatttttgaactctctagtcttctgtctcatttctgttatttttaatttgaaaaatcatcttagtgcaacttaggatagagaagagatccgtatctttaatcactaaactttgtaatcataatttttagtggcattattgtaatccatcaaccgcttatgctatggtttatttaatcattttcttatcattgtacagaacaatttttccttatcaattcttaggttattttgaaatacagcttatataggaacaattaatctacgaattttcacaatgttgttttggtgcccttgcaccctccaaaagtgaatcagtaagaactcttttttttttttttgaaatggagtctcactgcgttgcccaggctggagtgcagtggcgtgatcttggctcaccacaacctctgcctccttgtttcaagtgattctcctgcctcagccgcgccaccatgcctggctaattttttttttttttttttytgcatttttagtagagttggggtttcactatgttggccaggctggtctcgaactcatgacctcatgatctgcctgcttggcctcccaaagtgctgggattacaggcgtgagccactgcgcccggccagaactctttttactatcggtatgaatacaaagatttttgtatatttgatgggttttagtccactgcaattattcttgtttttttcttttctttcttttttttttttaaattatactttaagttctagggtacatgtgcacaatgtgcaggtttgttacatatgtatacatgtgccatgttggtgtgctgcacccattaactcatcatttacattagatatatctcctaatgctatccctcccccacccccccaccccacgacaggctccggtgtgtgatgttccccgtcctgtgtccaagtgttctcattgttcaattcccacctatgagtgagaacatgtggtgtttggttttctatccttgcgaaagtttgctcagaatgatggtttctttttttttagacagagtcttgctctgttgctcaggctggagtgcagttgcacaatctcagctcactgcaacctttgcctcctgagttccagcaattctcctgcctcagcctccctagtagctgggattacaggcatgtgccatgacacctggctaattttttatttttatttttaatagagatgggtttcaccatgttggtcaggctggtctcaaactcctggccttgtgatccacccacctcagcctcccaaagtgctggggatacaggcgtgagccaccatgcccagccagtgcaattattattctttttgatgctaaaatgaccccagctttggccagtgggagtgccttcaagttgactcctgkgttttgttttgttttgttttgttttgttttgtttttgacccaactgcactgggctttgattgcttctttgctttttggcctgacagggtctctcaggcttattttacacatttcctgcccctgtatattttaaggtagatttctagaattgagaattgcaatgatgcaatctcagctcactgcaccctctgccccctgggttcaagtgattctcaattctagaatctcttgttaaatactgtattggttcctaacagtgaycaataggaattcctttaccctgctcttcccaacttctaatttaaactactatatacttttttaaaactcccaattaaaggtaatcaatgaacttatttactttacatatattatttcccttctcttcctaatttttggtagttgtatttgacctgcattgctagattctaaaaaagctgcattctactttttactctgccccattgtttaactttagttaaatacagtatattgatggtaactatcatttcttatccaaaagcttctctgattatttcagaaattcatccyctagttgctctcccatggagagggctcagggagcaattttccctgagctcttacaagtttttcttgtggtctttacattaatagttgaagatcagtttgtctaaagttaaaatccttggttcatagcttcttgttttgaatatcttaagtatcatacttcttcagcttctggtataaagtgttcgtaagtatggtgtcaatataactttctttcctttataagtgtttttgtcttgatgtttaaagaatgttttttaaaatttctgattcttaaaaaatatttctcagtgttgactgtttagtatcagttttcccagatattcagtatgttcttttaatcatgtatgttcacatacttttatttcatggcatttaaaaaaattcctgcagaaccccaaaatgtaccctcctctcccccatcttcttgctcctttacttcaaactctacttcctaagtaaatcactcggctcactttaaagtttatgggtggtttgcctgttcttggaagtttctttttttcctttttttttttgagacgacatctcactctgttacccaggctggagtgcaatgatgcaatctcagctcactgcaccctctgccccctgggttcaagtgattctcatgcctcagactcccaggtagctgggactataggtgcgcatcaccacgcccaactgatttatggatttttagtagagatggggttttgccatgtaaaccaggctggtctcaaactcctgacctcaagtgatccgcccacctcggcctcccaaagtgctgggatggcatgagccaccrtgctcagccatgttcttggaagtttctttaaatggaaccatgcaggatgtattttgtttgtgtctttcttctcttgctcaaattatatgattcatttatgttgttactagattaattcatttttgttaccaaacagtattctattctgtaagcatagaacaatttatctattcaactgtcgatggacatttttaccatttctgatttttgaccactttggtaatgccactgctgttagcagtcctgtacaggtctttgcctgaatgtgtatgtgtttctgttgggtatatactaaggaatggaaatgttgggaaataggattttcattcaactctttgtatatgtattttcttaaggtatgatgtaagaatggagttgcggggtatctttgttttgtgttgctacaaaggaatagtcgagggtgagtaatttataaagaaaaatttgtttggctcacagttctgcagaccgtacaagaagcatggtgccaacatctgctcttgatgagggtctcaggacgcttccactttcagtggaaggcaaagcggagctggcatatgcgtgtcctatggtgagagaaggagcaagaaagagagaggagaggtgtcaggctcctttcattaaccagctttcatgggagctaagagtgagaactcactctctagagaatggcaccaaccattcacgagggatctgtccgcatgacccacacacctcccaacaggccccacctccaacatttcaacatgagacttagtggggccaaaaggctccccatatccaaaccatagcactgggtaattgggtattgttgcggtttgtattgccacgatcagtgtatgacagtcgttgctgttccacacacacattcttgctagcccttggtatggtggggcttgtctttgctttttgtttttgaagccactttgggggctgtagtggtatctcattggttttaaatttggatccccagatgactaatgaggttgagtacttcttcatatgtttcgtatgggwctgtttctggaccgtctgctcttttctgttgttctgtcgctatgtcagtaccacagtgtcttatttgcagaaaaatctgttggcattttgatgattattgcattgaattcatagtttaatttggtgagaatgaatatctttacaatactgagtcttataattcacaagtgtggtgactctttctatttagttaggttttcagtttctcccagtaacactttctaattttctcttatagatcttgcatatctttcactagtgtttttcctaggtgtygagaaaatgatttttaaatatttgctacttaagaatggggttgcgggttatctttgttttgtgttgctacaaaggaatagttgaggatgggtaatttataaagaaaaatttatttggctcacagttctgcagactgtacaagaagcatggtgccaacatctgctcttgatgagggtctcaggacgcttccacttacagtggaaggcaaagcagagctgatacatasaaatgcctcatgttactgyagtattgtgcacttagaacatttattcctttatctgtagattcttttgtttgttaataatgccaattttatttcttccatgacaattctttatccatctatttatgtttgccttattgttcagtctgggacctctaagtacattgttgagtgggtagatccgtgataatggataatccgtagtaatggtagatctgtaataatggatctgcttgtctcttttccttcaaattctttttgtcttttttttttttttcatcgctactcacctattgagtctgagccttctctcccctgtgctttagtattcctgccctgctcaccctggttctcctttcagaagttcccttcctgtctggggaaccactacttttggaaagcatgttttgccactgttgttcctcccccggcttatattttatttaaaagtcgatcaaacattttattttgtgtccaccaaacttgtgatatctatagggtgaaagtcttggtattcataggatggttgaatagattaaaggggtcagtccacatgaagcacctggaacagtccggccatagtaagcactcactgtttatgttgtaattattagtaataatgagaaaatatcatattctttcactcattcaacaaaataaccatttcaataaataatattaaagttggtagtgactgaaagaaaaacattgagaataagactaatttattgcttgtctgactcactttttggcaaatgtgtaattagatacacgagaagcaatcattagtgtaattggtgtaatttctatagctcggtgtaatttctatagctcagaaagtctttttttggatatcgagttctttcatgctttattagatttatctttcttctttggaacttgatgaaaaacattattttgtcctagctggaaaatcaactttctgctgccgctcattgtcaaatatttcttacacccacagtctgagtcggtgtagtagagtcttgatatttccacagtaactgccttcgggagtagaaatacaatacatgtatgtttagggtagaccaagtgtctagaatgaaataagacttcggcgtgtgccacgtggagctgtttaaccttcctacataaatcagcagtgggagaggattgaatagtgtctgactgtttttaagattttttcgtaccattccaacagtacctatttctaaatcacgtattttacttaacaatgtatttgtttgtgctgaattttaaaaatctgtagtatgttgaggtcctacctggcattttagtaaaatatcctcttgaaattaataggacaattagatttggtatcttgcaacttcatgaaaatgtgttgccaaagttcatgacatcgtccttctccgtaggccaatgaaagtacattgcatcatcctagacctggcagtttgtgagatttgcaaagacgttagcacaggctcttgtgctgctgggatagtgatgactgctgctttggcaacattattcagtgtatccagggaaagactatgaggacctgggggatagtggagctgcttagatggaaagaagctcggcttttgaataactgcatgaaaccaagagcccatccatcctcccctcttctctttggaacatggcacgagcaaaaagtaaagacataacaaaactacagaaagtctgctgtgtagaaagactatacaaagaatgaacaaaactagagaagtgcaggcgtttgataccataatccacatttacacagagggtgtgcttttgttacccttgatttgtttatctgaggattctgcaatatactagaactgcctgccaagtttcaaatacggtacacttaaaaagtttggttgcaagcataaacttttatcaacatacccgtgaaagaggttcagtaaatgtgtagagaagactcagcgaaattatagtttctctttccagtgagtttagcatattttcactttttaaaatctctgggctcatttgaaatgctgttgaccccatggtatggcctccctcccatattggcaaccaagactaaccggcagctattaaaatagaaaactgtaaggaaaatagacttttcccacagcatagaattctgaggttaaaaataaaaaggaagtaaaggtggcagagagaaaaattttctttactttccctcttctggttttcattaattttcattttcttttgctcacagaacatgtttgttttcttttttgagaaaattggctaaaaagcaagttaaaacaatgtaattagttgtttaatgtcaacgcctccacaaagtatactataaactttaagaagatatggactgaaggtgtgtctgtcctttctgtaccctcgatgctgacagggcacattactcgacacctaatagacacttattaatttgtgtttttggatgtagtgtgacattttgagaatttttataattaaacttaccttttggaacaatttgtggaatgctaaagttgtataaagctattcctcagagcgtgtaggattttatgtaactattatatgatatactgatatggttattctatcactgttrtctcgtcatgtgagaggatacttttctataattgtaacctaagtctgaggctaaaagggaagaaatgaatgaagacatatgagttgctgttgcagagatgagctatgaatgaacattgaatgggcattgggaagaaaccgacagattcagtggtgaatggaacttctaaaaatctaattgtggaaataaaaaactcagtggatcaaatggcttcaattgcaaattagatacagctgaaaagaattagtgacctcaaaaattatctgaagaacaagaaagtagacatataataataatacatgtataattatatattataaatattataattatgtaataataaggagtgatagagaatacaaaagaaattcccagtggtaagaaagttagaatgagagagtctaatgtgtgctcaactggggatccaggcagcgatgataaagaaaatagaggaagttggatgcagtggttcacccctgtaatcttagcactttgggaggctgaggtggaacaattacttgagcccaggagttcaggaacagcctgggcaacatagcaagaccccatctytatataaaaaaattaaaaaaaagagaaaatagaggaaaggtgatatttgtgggataatgactacatgctttctagaactggagaagacccatgacaccacagactcaggaatcacaatatacccaaaacagaacatatacataaacagaacatatacataaatagaaacatatatatgtatatacataaaggcagaactagaatattttgagcaccctcattttttaattaaaagaagaaaaatactcttagataataggatgggaggaaaaggaggaaacttayggatatctactgaaatctatagtaattattatgcttaatggggaaaaatgaaaagcattcctttaaaaataagaaacaaataaaaagtgctttctrtcgccacttaaaaaaatcttggaatagagatcctagtcaccgttgcaagataagggagagtggggataaggattagaaagaaagaaacaaaactgtcattcacaggtgataggwttatctctgtatggaaaacccaacrggaatctacatactagttaatagagtggtcagtgctgggtggctgactgcaaggtctgtatatgaaagtcagctgtgtttctaaccccagcaaccaacaggaaatgaaataaacaaacaaaaaaaccctacttacaatagcagcagaaaccatgagttagctaggtaaaaatttaacaaaaaatgttcaaggcttacatgcaggaaattatgacactttactgaggcacaagtggagagtgatacttgttcacaaatagggagactcagtattgtaaagatggcaattatctaacgtgtattaattattttttttaaagagatggggtcttgctttgttgcccaggctggaatacaatggtacaatcatagctcagtgcagccttgaactcctgtgctcaagagaacctccgacatcagcctcactcctgggttcaagatatcctcccatatcaacctttgttttaattagctggggacctttcctggctaattaatttttttttttaagagacagggtcttgytgtgttgctcaggctggtcctgaattcctgggttcaagcaatcccttcacctcagcctaccaagtagtgaggattataggctcggaccactatgcctggctagtggtttaatgtgttttagagctttggattatagataccagcaaagtgtcaccacaagccaacccacacctgatggcatagggggtgctcttcccactagatatcaagttttatcatagagtctcaatagtgaagatggcatggtattggcatgggagtagacaggtggaacaaaggaacaaaagaactccttgttacagacttgtaagtctatggaactgggacagtactgtagaaaaagaaggaagctaaaataaatagtttatacatataaaaaaggatggatttggatccctacctcacatcataaaccaaaatcaattttagatgggttatgaatataaatttgaaaagcaraacctgaaaactcttagatgatgagataaaagaggctgggcactgtggctcacacctgtaatcccagcactttgggaggccgaggtgggcagatcacaaagtcaggagatcgagaccattctggctaacatggtgaaaccccgtgtttactaaaaatacaaaaaattaacggagcatggtggcrggcrcctgtagtcccagctactccggaggtggaggcaggagaatggtgtgaacccgggaggcgaagcttgcagtgagctgagatcacaccactgcactccagcctgggcgacagagcgagactctgtttcaaaacaaaaaaaaagaaggtgaggtaaaagaatatctttcgacttaccataaaaattggtgtgaaaattttaccacattaaagctaagaacttcagttcatcaaggtgtcccataaataagtgaaaaaactagccgtaatttgagagaagataattgtaatacatataattgacaaaggtttagcttcctgaaaatagaaagcacatctacaaaagagtgaaaaaaacaatttaagagaaaacgggtagaaaacatcagaaacatgtaggggccagtagatatagaaaatrtaatctttttttagacagagtctcactctgttgcccaggctggagtgcagtggtgtgatctaggttcactgcagcctccgcctactgagttcaagcgatttgagcctcagcctcyggagtagctaggactacaagcatgcgccaccatgcccgactaaattttgtatttttagcagaaacggggtttcaccatgttgcccaggctggtctcaaacttacaacctcaagtgatctgcccrccttggcctcccaaagtgctgggattataggcgtgagctgccatgcctggcctagaaaatataacctaaccagtaagcatgagttgcaaattagtgccacagtgagctagctattcacttaggtcctctagattggcaaaatataagagatctgtaaatctcaagtattggtgagtatgtggaacaacttttatgttattctggtggggtgcaaatagataacaccattttagaaaacatttgatgttaacgtaaaaatatttatatcctgtgacccagcaattcttctcatgagaatttatctgaggaaaccatttccwtatatatataccagcaaacttttacaagaatattttttatcagccaagtacttatttattttttaaattttagatcagtaggtacgygtgyaggtttgttacatggatatggtgtgtgatgttgaggcttggacttctgttgagccggtcacccaaatggtgaacatagtatccaataggccttctcaaacgctgttcccttgctttccttcccgcttatgcaggcccggtgtctgttgctcccatctttatgtcccytgtgtacccagtggttagttcccacttataagtgagaacatgcagtttggctttctgtttcagtagcagagttcttttgagtgttttgtttgtttgtttgtttgtttgtttgtttttttgaggcagagcctcactctgttgcccaggctggagtgcagtggtgccgtctcggctcactgcaacctccacctcctgggttcaagtgattcttgtgcctcagcctcccgagtagctgggattacaggtgcatgccaccacgcctggctaatttttgtatttttagtagagatggggttttgccatgttggccaggctggtctcgaactcctgagctcaagtaatccgccctccttggcctcctaaagtgctgggattacaggcatgagctaccatgcccrgccccactagcagagttcataatagcagaaaagctatatcaattgggatatctattgatagcaaaataggtaaataatttgtggcttttctgcagaacaaagtattatgtagcagtgaaaaataaatgatctatagaatatggaacaaaatgagtgatctccaaaaccgtaatgttgaagggggaaaaaagcaagtgttggaaaagttcttacagctcgataccatttttatgaagctcaaaaacaagcaaaacagaacaatatattgttgaaacattcacacaagagttgtaagaccagattttttwwaaaaattaaaagataaggctgggtgtggtggctcacgcctgtaatcccagcactttgggaggccgagatgggcggatcacctgaggtcgggagttcgagaccagcctgaccaacatggagaarccccatctctactaaaaatacaaaattagccgggtgtgatggygcatgcctgtaatcccagctacttggcaggctgaggcaggagaatcacttgaacctgggaggtggaggttgcggtgagccgagattgcaccactgcactccagcctgagcaacaagaccagaactctgtcccaaaaaaaaaaaaaaaaaaaaaaaattraaaggtaaaaaataatctgggtaatggttatttcttggaggatggaggagtttggaggggaaaggggcacacagggttagatgtaaaatatttgtactattctagyggatggtttgttggtaggttcctagatgttcctagtaaattataacttattaatatgcaaaatgcttacatgctcttttatgtactgaatgatataagataaagaataaaagagtagaaaaaaagctctgactagattatacagttttattaaggatgttatgtagttaaggtacatcaggatttaaatttcatttgttggtttgcctggaagataagcaccttcaggaccatgtgggacactaaattctttttttttttttttttttttgagatgagtcttgctctattgcccaggctggagtgcagtggcgcgatcttggctcactgcaacctctgcctctggagttcaagcgattcttcggcctcagcctcccaagtagctgagactacaggcatgcgccaccacgcccagctaatttttgcatttttagtagagacggggtttcaccatgttggccaggctggtctcgaactcctgaactcaggtgatctgcctgccttaacctcccaaagtgctgggatttcaggcgtgagccaccacgcctggccaggacactaaattctaaattttacttttattctaattggcctgacaggagtcagtgcttatcaaaatgatttttggaagatgtcatgcccatgttttttcakgtttgatgtgatgaacttatcatggctgcctttaaamtatttgaggctaaagtcatctggtccatacagcagagaatgaggcttctttctttttttttttttttccttttcttagagacaaggtctcactctatagcccaggtcggagggcagtggtgcagtcatggctcactgcagccttgaattcctgggcttaagcaatcctcccacctaagactcctgagaatttgggattataggtgggcaccactatgcctggctaacttttaaaaatttctttatagrgataggattctcactctgttacccaggctgatatcaaactggcctcaactgatcctcttgccttgacttcccaagctctgggagtataggagtgagccacagtgcccaatcaatatctttattttaaagagwcatctgcaaagtccctttaccatgtgaggtaacatagtcacaggctcgggcgatttggatgcagacatctttgggggccattacccagacaccacatgctctattattgttgctgcagctgggaacggtgggatctctgtgttcatttggagccataggtattagtgaggmgaagagaatcaccakattggccaggggcattcaaaatgccattattgtgktaagccattcattaactcataattcccccatgtttctgttttgatttagrtttaggggatacaaatgyagttttattacatggatatatgtatagtggtgaagtctgggcttttagtgtaaccatcacccaaacagcaacatacattttacccattaagtaatttcttattcttcatccctcakccctsccccacttctgagtctccaatgtctcttacaaagatgtccaatcttttgggttccctgggccacwttggaagaagaagaattatcttgggccccacataaaaaacactaacactaatgatagctgatgagctgaaaaaaaaatctcataatgtttgaagaaagtttacaaatttgtgttgggctgcacgtggcccatgggccacaggttggacactcttggtctattattccacactgtccatgtgtacacattattcataagtgagcgcttacccacacttttttaatggaagcttctatcgggtgactacctgccttctctacctacctgtgtttggagtcccctgttgcagccctccacttagctaccaagtagttctcaccragaaaagcctaatagtggatagttagctatacagtgtgaagaggtgctatttcagttctggaacaccttcattttacctcatggtgagctcaccattaaaaagcgctttcccagaactctgagatgccrgcatctgcggggtctcctatccctctccctcccctctcaggaggtctcctgggcctctcctccaccctgcttcccttctsaaactgcagacagtcggttctccctgggtgatttctttctcttcagttcatttcagttaccatttacatcccctgactctcccaatctttgtcttcggyctcgatctttctttttaaagccaggcctatgtcgtcacctgcctgtcccacttctccacgtgggtgtctcacaagsctttatgctcagtgtatctcctctacatttgatctctacttcttcagacttctgtgtttcggtaaatggcagcatcgttcctctggtttttatagaaatatartactcattctttttttttttttttttgagatggagctctggagttttatcacccaggctggagtgcagtggcgcggcctcggctcactgcgatctccgcctcctgggttcaagcgattctcctgccatcacgcccggctaatttttgtatttttagtagagacggggtttcaccatgttggccaggctggtctcaaactcctgacctcaggtgatccacccgcctcggtcacccaaagtgctgggattacaggggtgagccattgtgcctggccaaaatatagtactcattccagacacttctttctcccactacaggcagtcaaattccaagtactatttttttaacctgatttatttatttgaaaatatttgagtatgtactaagtttcttgcctatcctggtccctgggtgtataggtgtgaacatgataaaccagggcagccctcttttctgagagaacttatgttaaataaataaaaagtgagcaagacaacttctatggtactgtgctgtgaaagcaatagtaagggtgaataggtaagatagtaagatgggatcacagagacctctctgaagaggtgacattttaattgagatctaatgtcaaggagtcagccttaaagatctggagacagaaggaacagcaagtacaaagtccctaagttgggaaaggctctggatctagattcaagacrctgtgaagtgcaaggtggccagagtgtcatgaatggagggagaggragggatgtgttcagacaggaaagagagrccagatcacagggaggattggaggtgctgtgtgctgggtggattcatgccttcctccaccccttcactaccctcaagacgtctttctccctggaccctatgactgtgtcaccttacatgacaaaagggactttgcagatgtaatgacgttaaggaccttgagataggaagattatcctggactattcagttgggtccaaccaatgtaatcacaagctctgtgtaacggggaagtaggagggtcataggaaggagattcaaaaatggaagcagagatatgagagagagagagagaaagagagagagagagtgagagaaagaatatggagggggcttaggcatgtacctgcaagacaaaagtcacggtgttttataacctgatctcaggagggacctcccatcacttttgtctgaatatttcaattcattagaatcaagtcagtaggttcaaccccccaacaaggagaaaagatgacaccaggaagtaagtcctgagaaggagaatctttgggagccattttagaggccgcctgctgcacacctagtagatgactattgaacaacgaattaatawcctgctccccactgtttttctgaacctctgcttctctgaacttggagttctttggtcctttggtggccatacttgtccactttctttcctaagcaggtctctctttcccggtaagtatagaagaatacgatgattcagatagacttttcatagtatttttatctttgtatttttttagaaatatttcagagtctcctgacctgtgggtggcatttttctctgctattaccatgcrttaaaaaaaatttgtactgtatattatttggttatttcagtgggattctgagtagggtgtgtgatcaattcgtgggctcagttcaccatctgaaactgcaaggccttgttctgtgttttcaaggtaattcttcccacctttagtggaattgttgatatttccacatgtaaaatattaatttgatggaaaacagtgtttcctttgcttcttcagagagttgtctttgtatccctgaagtccaaagcttcatttaggttttattattaagcagtgctttgttatagctgatctgagaggaaacttcagccggatttcagagtagtagaatttgacagatttgaattcaattgctttctgaattgtgacttggattttctgggtgtgtaaactatatcaataagaatgtattaaccatctgccgtttgaaagtaatcagattttacctatctgttggaatgaaccaagagattgtttaaaagctagaagaaaggcataacaatttttacaatttcctttctgtaaataagttttaacgtatagccatatgattctaaggacttagaatctatttgaattagaattttctattgagtgaaaagttggggaaataattttcttagaaaataaaggttttattttatgttaaaaataaattgcgaatattttcacttagacttcagaaatcgaggmtgtttagctttgaggtggtaggaaatgttgtttaggaataggaatgaaatgtttagcttcggtctgaatttcctctctccacctagggaccgtattcttacatgcaaaatgattacaagtttttgtttcttactgaccaaggggtatatttgattattcatgcctgcaaagcttcttgtataatagcagctttcatgttctattraaaaaagaattcatagcaaaaaatgtttttcataggaagaaaaacattttagataactctgccaggaataagaagggaatggaagcagtgtattatataaaacctgcggggggtgggagggggtggggaacgctgttttttggacatgctacagtatatatttgagtgcattaaaatatcccagctgtgatggtagcagtgtaagcaaattacattttatgttattatacaaagcagcaatatagaatagcattttagaacataaatgtgcatgaaagtaaatgaaaaatgtatgttagtgtgtgaaaggacgattttgaaatagtgccataaataaaagaagatgataatagcagcactgggccaatgccagagcttcttagtctgggaccatgttataaatcgctgaggtttaaatgcgctaacggtggcagcaatcagccagcatgaaaagcatgaaaggcagaactttggaaaaaatgtgaataatgaaacattaagggattgagcaaacttcagtttcatgaaatgctaaaacctgttctgtgtctctttttaagtgaactctttaaaaatatactagttttttccccaaagctacttttcagacctcaaaatcatggttttttagaaaagtaacacctggttctgagagtcacacacatcacaagcctggaccagtggtttcaggtaaattgccagattcagaagaccgtgtttgtaagggaaaaagtattaatattcctataccaaagtcatatagttcaccatgagttctgcagccacaaagaaatgttagatttccttttatttgttagattcatgtattcagagatagtaggtagtcgtggttctcaaggtgtggcttgtggacccctggggatccctgagactattttgtggggaggctcttcaaggtctaaactattttcctgataatattatgatgttgtttgcttttttcactgagttggcatctgtactgatggttaaaaatactgatgggtaaaactgctcatgctgtcacacaaaccaaggccatggcaccaagtggtactagttagtgagttgtcatgttcttcaccatggcacactcacaatcaagaatagttggctgcattaaatcttaaccatggtacacatctctttactgtcaagtctttttaatctagmagaaagaggggaatactcagaaagcacttggctgcaaaccagagttctggttagcagaggacaagtagctgtaggattgtgagattgtgaactaaactagtttctttttctcataggaaaccattagaaactgtgtctatgcagattgtggtgtttggaagacttttttttttttttctaatgatcaaagtttgcctgtcattaaaaaaccaacaacaaactgtattgttgccaatgaataaaattcaagcttttgagcaagtattagaattttgaaaaacttgtctctgccactctgagattgccagctttctagtacttaaaaactttttttgatgagattggtggtgatattaatgtgtggctttttgttgttgtaccatgaaatgtgtaaatgtttggaaaatctgcataacttagtgaagcagtattttccaaatgatcaatgcataatatcatgaaactatgcatgggtaagcgccatgtagaatgcaagagaaaacaaggattgtaatgtaaaggcatatggaaagcccagtgatgcagctgcagggtccacattgcatctcacctctaagaaagtatcagctgcagagttttggtgtagtatcagtgagtatctacacttagctaaagaggctctgaacatattcctctctcttccaactgcaagtctgtgggaggcatgatttgcttcatgaacttcaaccaaagcagcgtgtcccagtagataggatgcaggagctgataggagaattcagctgtttcctttgtagccagaaatgaaagatatttacaaatttgtcaaacaatgccactcttcaaaaacttttattttggaaaatatactgatttttggtaagatgtcattttaacacatttattgttattttaagtgaataaatttttaaaaattcttagttttattttcagtattacaaattatcagtagatataagcacatagaactctttaagatactcagtgaattttaagaaactaagacgagttctgagaccaaaaaagttgagaactattgggctatactgttctagacaacaaatcaaacagtgctcaaagagggagttttaattttctccaatcactgcatcaaaatatgttacatcaaagctaacttttctatctcttttaacaaaatttctggcagtctgtagcttccaggacattttcaattattaaaagctcaatttagtattcctttgtggtcatctctgatctgagtctcacctcctcctgtccctagtgtcagccaggggtaggggagttggcttggggatgggggatagtgtgttctccttttacccctactcccccaataccctttgcaagatggatcggtttgcttttgaaaggagatccagttcttctgttgtgttgggrcagggagacagaagttggccacattattgcctcttctcaggccagcactgaccagcattcttactctttgtggaagtgctcaaatgttgcatttctcttacagtgcatggcttgtgtaacccaaaacctcctgtagtgctgtaggctggattatctgcagggtggctccagcccaactactttcagtggggtccatgtgacctgtaggtaactcatgcatcatttgtaggccaagcaactgtcggcctctactgttccctctctctgttctgccatcctgcctcatttcccttgtcaccttgattagagaaacacgaaaggaaaatcagctagtctgctgcctgcataggagctagagtttgtcctctgtcgtcttctctgtacccctgttctctatgagggattgtctcagagacttacctccattattctactcttcactaggctgtgggcccccctgccggctgtcccctcttttcctatttccgtaagacaatttccactctgtagtcctatgtrtgtatgtatatatgaaatttatatttcatatataaatttcacacacacacattctgggaagtggcagatagaagatagttgatggttacatttcacccatctctttgagtctagagaagtgtatgtttcagctgtttggagtttttcttagaacatgrgacttaacacttctttttcctcagctttggggactagtcatcagttttggggcaagaagaaaatcattgcatttatcatcctcttccacrgtgatcccagggtgttaccaactgtgcaggattagaggatttatatgtccacttatcactaactaataataacgttttaacatctattttatgtgaggcattgggttatgagcaagggatctggtggtgaactctagggacattgtccctgatctatgaatttccttaccgatgggggtgtaaacagataaatatgataaatctataaatacaaagtctgataaggatagtgaacaaaaagaataggaagccatcagacctaataatgaaggagaactggttttgattgggtaagactgttgggaaragctgtgtgtaagtgacattttagctaagactcagagatgaatgtgggtacccccaagactcaggaacattgcaggcagagaggatgccttgaggtaggagagactctgggtgcttgagggtctaacataaggtccctgtgggtggaacctgatggagaatggcttgagatggaagtctgcagggtccagggcatgcagagccccagaacaggcttgagtttcaagtgcattggcaggcatgcccttcatctcaagagcaatggcaagccaccaaagggcttaaataaggaagtgacaaccagtttatggttgctgggtatttccattgtgaataaagtctgattcctgtctaatagtcattttccatacagtcacattggaatacactccacattccctaaccagatcctagctcatctcaaaattatgtgagcttccttattaatttcaacagaatttgggcttgtgggcagagggtctttggattcccaaatgatagacagatgagagctgacaacagtgatagctagccctgtatcgtctttgaagtgactctgacggttactctttttcttttccttttccttttctttcctttcctttctgagaccaagtctcgccctgctgcccaggctgaagtgcaatggcatgatctcggctcactgcaacctctgcctctcgggttcaagcgattctcctgtctcagcctcccgagtagctgggattacaggcacgctgcaccacacctggctaattttagtatttttggtagagacrgggtttcaccatgttgaccaggctggtctcgaactcctgacctcaggtgatcctcttgcctcggcctcccaaagtgctgggattacaggtgtgagccaccacacctggccgattactctttttctaagaatctttccacctcactgttacactttttcttgtgtgagggtttcattctgtcttctcaccaaagatagaactttcttctttgggaacagggcagctagagctgtgggtgcgtccagacagattctttttgaacctgttaataaacatgtagatctaggtttttcatcacacccctcattcctccaggaaacctccttatgatactctcagcttggtcttgcaccctttccatcatttgccacttgcagtgatcacagttagtgtctgcctttcctgtgtccgtatctggtggtcacagttactgtctgcctttcctgtgtccatccaggcttccrttagccctttgttcaggtcctcttctctttttacttggactgtttttgaagaaatgtcaatagagatggcatttggttgcgtgacctcagaaattctcttcttgaatataggtgataccgattaatctttgatgttgatctttaggtcttgattgtatcatatgtatacacracatggtgtagtcaaagggagacgagaatctcctcttactaggaacaccagtggaagcgagcaggggaattggaaataaatactgtttattaggtgttttctattttccagaacttgcrtgaaactcttttaatggtgactttcattctcacagtaaccctagttaatagatacgattattatcctgttttaaatatgagaaaactaaggcatagaaagttaaataagttgcttaagcataagtaaggggcggaattgggatttaaactcatgtatttgacttcaagactctcagtaaattatgttgatacttcatcttttaaaactgtgaaaatactataaattcttcattttttttagtgcttttccttttctctatggagataacagttaaatctctaacgtacaatgggcctatatgtttatcttggaggcagcaaggaaaacaatagctggaagagtacatctgatttcacaacagatttggggatagaggcagtgtggtggctgctgagaggagatggaactgcttaagtccattgtgtttgcaaagaaagggaaacctgaggaaccccaaagtcatctgcactgagcagtgaccagtttgtttgttttgttttgttttktttttttaagtttctgaccactagcacaatatcctcctaacaggttttctgttcctcgtcttacctgctacctcccttcctccccaaatctgtccaaggaaaatggagtgaagcacaaattggcccaagggtctcctattctttaatgcctttttctttttctttcttttttttttttttttttttggagacagggtctggctctgttgcccaggctggagtgyggtggcacaatctgagctcactgcaacctccacttcctgggctcaatcaatcaatcagtctgcccacttcagcctcccgagtagctgggactacaggtgtacactaccatgcctggccaatttctgtattttttgtagagttggggtttcaccatgttacccaggctggtgttgaactcctgggctcaagcaatctgcctgccttggcctcccaaagtgctgggcttaccggtgtgagccaccgcacttggcctttaatggctatttatttatttactgaataaagtcttaagtcctttagcataaatcacccatctgtatttgggtattttcctagaaaatgcatgcaaacaaattgtatatagttttcaggagttcatgaatcaactgagtcacacatgaactctcctagccatagatcccagactcgccacgttttaagacggttcattccatcttttgttacaaaactagttttaagctgtaattacagttttaatgtttgttaaaatgtaaactgcaaacaagtatacaaggtaattgattgctacttgtatgttgaaacctgtctgagttccatgacatcatctgcagtaacagctatctgatcaaaaatttaacagttcccacttcatcaacaattactggaaaaaaaaaacaattactgaaatacagatttttgaagaatggcagctctcataattgtaatatgtggggagtgaaaaataaatgtatgtagaaatttggggttgtttcaaaatgggacagattatatatctctggattggagaattcaagtttccccaccmccccccaccccaactaactcagattttccaaagaaatgtttaatgccctggctactttctctagaacattattctgggaactaaaggaatttgatctgtagaaaatgttctgagaagtggtttcaaatagtatcactacattttcaaccaaaatgaaaatgttgatggtttgttgctttttaatcatttaatttaagcctaaaaacggtttttggtgctttgtattttgtagactttatagacatgttccttataagaattatgcatctgtgtagagatgttgcaaacaccctggctggaattgaaggcaaagtaccagttgctcccagcgattcctatgggaaggctttatttstttacatttttacttctgactgtgtagcttgagcaaaggtacagcctccaagtttttaggctttatgatatacacacacagaatagctacttttctagggctactttgttagtgagtgggaagatgagaaaactttaaactactagggagatgacaaagaagctggtctggctcttcctgggattaggtaggaacaaaagaaagtctgctttaagagtttgtaaccatccatggacttgttggtccatggcttaggatttgagagttttatccaccaagtcctacattgtaaagttagcaaagtggccagtgatatttcaaggtcatgcatcagaaataaatacatgtttctgaaaggatcgtgtcccatggattttctttttttagtacccagaatcttctccccacccccagtatttaaaatatggaggtagataggtgtatgcatgcatgtgctaattctagatctggtaccattaattaayatgctgaagagtcaaactactgggcagtaattttcagtasttttttgtactcrtaatagaagccaataaaaggattacagctttagtttacttaatgtaatgtaatgcagatgaccatggtggagtctgtacatcattgacaggtataaaacacatgactgcattggggggtactttattcatagtttaattattgaagctttatttttaaaagttctattgtatgtgtaagtaaaacagatttcctcactaaaattaaacatttatttttaggaagtatgtaaatgaaggtaactatggcttccttatgagaactgcttacatattaaaattatttttatttttactgatgttttctgattacaaatgtaattataggaaaaaaacccttatggacatatacatagagcataatgtatatagattttgaaatgtccttttttcttaatagtgcatttaatatattttagcgtgtcctgacttttaggatcttgtttttgaataactgttatataaaattaatttaaccagatttccccttttctccagacttctttactcctaactcctttcctccctcatctccttctctgcttcctcctcttccagttgctcaggggagaaaaatgaagtatactttttttttgttttcttttttgagatggagtctcgctctgtagcccaggctggagtgcagtggtgagatctcggctcactgcaacctccgccttccgggttcaagccattcttctgcctcagcctcccgagtagctaggactataggtatgcgccatcatggccgggtgattttcatatttttagtagagatgaggtttcaccatgttggccaggctggtcttgtactcctgacctcaagtgatctgcccaccttggcctcctaaagtgctgggattataggcatgagccaccacactcggtctgaagtgtacttttattatgtcttgaatctgcaaagggaaatgtgtagttaaaataaatgaggttttgcaggtttggctacacctgatacttaataattgatgctagattgctcattgatgatgaagccacatctttggttatatatttgtctactagatccccaaatgttcccacttagggaaatttgtcaccctgtatcagagtaaatttttctgggatataaagagaaattatagactgcataaagttatgtcatgttctccaagaagaaggctactggctccatgtgggtatttaaatgtaaagtaaataaaattaaataaaatgaagaattcagttcctcaagtcaagccacagctcaagtgctcaaaagccacacgtggccagtggctaaccatattgggcaaacggctataaaacattttcaccatcacaggcagttctgttggatagccttggggtgaagtctatatgtgttgcctgtttattagaattgaaaaatcatttttttcttttggttatcataaatagtaataaaaagcagaatttctgtcaatatttttggaaacagtgaacagctcaaaattatttagagtaaatttttactcccctaccaacttaatttttaaaatgatgcrgtaaagtaaaacacatacgcaacacagggttaccagaactttgaaattctagaacatttaaaaaatgtttgatatggcacaaaatccaggagtgggcaggctaggggtgggatactctatcaattgggtcaggatctggagaagatgatggaagagaaactgactatttgtgaaagacgctcagaagaagcaaatgaagtggagaaataatgtgtttatttgaggcacataattttatgttataattagagtattcatagaaattaacctgggaaaattggaagccatcagaaagaaaacacaagggatgaagaggaaccaccaatgagaaagaaaatataagggatggagaggaaccactgatgatcctctagtcagtggaagcagtcactgygatttgttatatatctttccagccttcctttctatgccctacaaactggccatattcattaggcagccaaggatcgcagtgaagaacacagatgagatgtcagtctgagaggaaaagtgggtgattaggagctccagcactgagccagatggcttgagcttgaaatctcagctctgcctcttactgtctgcaagaacatagcaacttgtttaactcctatttatctgtaaaatgagatggtcccgctgtctacctctttattttcttgtgagaattgaggaattcaaattttaaactcattaaagactatgttactagtattactgacctattaggtgggtagtacaggcacctggtaagttcttaataagtctctatgtttattatagcagggaagcagacatttaaacaagtaactgcagtcaggttagatgagttttgtgatagggtaagttaagtattctgtgatactataygttgagatgtcttaattctcgataattatttaaacaaagtgaatttagctcagtatgattggtttttgttttaaattawatgttcatagtttctcaaatcaaatctaactctttttatagcttacagtctttaaagtttattaccttkttatgatacatctttaaaatttccaagatgttaagtaaaaatgtggctctgatcattctggtaatatcataagtgtcaaaattctttccctgaagctttacattgtgtactgggttgccaaaaaggtaatagaatcctctcttagcaatagcatctggctaatcagaataaaatttatcttccagacttttacaatggagtttggttagctttgagtataattaaagagtgtattacttgatacctgttaaagacaggaaattgtgaggtgcaactgttttttgtatatggtgggggacatttttcttcaactataaataaaaagagactaaagtgagttttcaagtataaaatatgaaaggacacctacacaagagctgaaatagatgaaacttaagtgctgacagttatgtgtttgtcaacacgtcttttgtttctcaactttctgctagatttttcaaggaactcagtgtgtcttacatgggatttatgtagattcttgcctttgtgtttcttgggtcacaataatgggaaatgaagggctaaattttttaaaatttattattataattattttacaatatgaaaaatgatctcatttatgctaaataattataagaaatgccactagttatgaaaaatcccttcgtttcttagaaatttgaagttgagggggaaagttggcaatttcaaaaaaaaagaatgaataagtataataaaaggaacagtgtgcttgagcagatgttcctggatgtggcacccaggcacaaatagtgccagctccttccctcttgacagtgattccataccaacctgccaaaatgtggctgacagtttattgctttgctttaatcataatttacatttttagcaggaatataagctgcaactgatacttgaaatattgcagcaatagattttagatataatagacatcacaaaacttaacatgcttattgaggggaaagacaaagacttagttttcaagtgggttctgtttgattaagactgttttttccatttgactccrtgttgtaaacactgggccatagtaataratgaattaggcacacatacgtgtcacctatgggtttatattagcatgtacaaacatattacatgtgtgtaatatgtcataaacatataactttaggatattcaaggattcagattctcttttcaagtataaaaatgtgcagctatctgagattgtttgctagcaggtgaacttatatgcatttgattttcttccagattcatgaaaaactacactactatgagaagcagagtccggtgcccattctccatggtgcggcggccttggccgatgatgtaagtgtgactctccgagctcactgggatgtgtctgctgcagacctggcccaggcagaacctgtcctagtgcagacagatgcgtgtgatcctatgagtgaaaagcagaagaggttacaaatgtttccaaaagtcctgtcatcactgagcttatgttaatattatgttgatttccattcacttttctgttctaaaaattttgcatgtagctactctcttgttctgctttcgtaacttcgtaatagacattttaggctttaaactctggagagagagaagctgtcagctgttggtgttctgagaaagtcacagacaagaggaatgctttggagaaataaagacaaatgagatagctctattgctgacagtactaaaaaatgacagatactaggatacgaacgaggcatatgaaataatatgaaatacataaaaagacaggattgtttttataatggattataaaacatagtaatgatttatggatattagacttttccaaattaccttcataaccaaaaaataaattttagaagcagttggcattgatggagtagttaatttcctgtagctataattttattttgaacttgggggaaggtaactaacttgctgattcttactgttaactttcggactcggatgaattgagaacacacctggataaactataaaggacatgaagctggaagagaaatatgtttagtgcgaaggctggttttagtgataacccgtagcttatttgttgcttttaatatttctttcctttattttttaagacaagctatataattcagtgtggtaaaatatccaggccataatataattaaaaaattggccatcttgagaagttgattttatttgaactactttgcattctaatttagaaaaaacacatatgtaataaatttgcaagttgcgtgctatttgtttagttcccatttttctttttgtttttatctacaaagattacaagtatgtttcagtatatatttaatgaggaagcttacttctgcattattgaagcaaaattttttaaatgaaggcaaataaagttgtagatacagttgctcaagtaaggcacgaaagccttaaaaaatcagttttaaaacatttactattcagagttttgggaaacatttgtttataaaccaatgttgttgtggcccaatcatattgcaaaaatattcctttataaaaagttagagactgctatataaatatgataaaccatagtatcttataatttgtcagagcagtatatttaaatgttaaaatatattatgttttaagtgactaaagtgtgcaaatgacctttatgtctttttgtaagttaaaaatgctgtagaaatattacctcaaaaaagtaaagcagtgtttgaaaggtaattaatgactgtataattttctatgattttattttttgtgtacaatttatattatgcccttcttttagagaaaattccttttccagagataagagcaattatttttagcttgttagaaaaagtaggggcaaatggaaatttcatgcaaggttttaagaygggtttttaaataaaaatgcatctatacatatgccacgtatttcataattctaatcttttttcctgtttgagtcttgcttttttaaagaaaattatgagatctttcctatagcctaaaattgaatgggaattttgataggaatatctcttaatggaagatatggggcaggtttgaagttgtaacaccttctttatgtagaacccaaaatgggaattcttggttattatagtagagtacagtcagcatttttggtaccagggtagctagctgtcaacccattatagctcattttacaattggtactatgattggttggtatttaacagatttcttcatctgtataggtaaacataataaaagtttcaggccatttgctctattaggggcattctaattatttttaccctagctctaaacagcacagctactgtgggtttttggaatccccatgggtttttggaaaccctgtggatttcaccacctcattcagaagctctgtttttgtgggggttgggggaggttacagtgtcaaagctttatccagttcttcttacaagtggtcctttgtctaggtgcaaaagaccattcacatggacgaagtgctggggtttgccctccttgcaataaatcagaaggtgatctggctgatacgattacttgatttgtactcagctgagagcctgggctcggatctggactaccgaaggtctaaaaagaagagcaatgattgatgatctgttttcttttatgctgacctctccttaaacattggaaagtaatagccttgagcaagttagattctcagttgtcacacacccaatcccacaatgcycttactaaatgttctttaagtcaatgtaatctccgttgcagctggccgaagagcttcagaacaagccattaaacagtgagatcagagagctgttgaaactactgtcaaaacccaatgtgaaggtgaggacatgttacgccggtaataaataccttcaaacagggccactttctgagccttcagatgaattttgtttcgagcatcaattctcaagtaaatgtattttgaatagggcacagtattttaatagcctaaatcctattaatgagaaagaggcgagcttttgattataatgtgatgagaaactgcaaaatactcttattgggaagctcagaatttaagttctgtcaaatgtagcttcaaggtcatttttgttttaagtaaagttaagagtacactatacagaacctactagtaattttgtttaggtccattttacttgggtagttaatgggattccaatatgtttgacaaacatacctatttttctatagggtcatttcagcattcctctttctttcccctttcacctccccatttcctgtccctttactaatttatgtttcaaaatgtcattccattttacagagaagagcacttttccagtgtaaaatacccataaaatattggcagacagatttcaattctccctttccattgcctcctaagtttatcacttatttttcctccaaatgtgatcagtttacagcaggcatttcagaattttcctacattattctgaagtcattactgcactaaatcctgcactgtatacattttggacttgacgctggggcaattatgtgtcagatattgttctgtgagtcagaattacatataggttacataattacataattaaaatgatcatttagcttgtgatgattactggtgagcatatgtagagtgttgaatgaaaatttcttcctagatgtaaaaactagtttctactttttttgagaaatagctttcagaatttaaaacttggttttaaatttatttttataaaaagagagatggtattaaataaaagatgaggttaaaaacatgtggcgggcgcctgtagtcccagctactcgggaggctgaggcaggagaatggcatgaacctgggaggyggagcttgcagtgagctgagatcgtgccactgcactccagcctgggcgacagagcgagactccgtctcaaaaaaaaaaaaacaaaaaaacaaaaaaaaaacatgcgtggactataaaccctaatccctataagtaaatgtaagtacatgaatgtattgctgtaaaagctaaacaggctatgattaatgatgtgagggtaattgatttgtagtggtttaggaagtttattaaatttttgttctgaaagaacaaggatcagattagagsagaaaagttccttgatgttaaatacaaagtgtgtaaaaacgttaaggagatttttagccacagaacgttctgaagatttcttcatttggtcttagactgcacctgagaagttagtatcacccaggggagggtgaggttagctatgaatatcttgttaaactcctttttgaaattattgttttggttcaagggtattagaaatgaaagcagcatgtttcagacaaaaaaaatccccgattatggtatttggttcaagagtgtttcaaatggaatagctaattatgcaatattatactggatgagaactggtatttggctcaagagggaggtatgactttagacgttattaagaagggccatttgataaaattttataataattagttaaattttattatgtggaaaatattttaggtggataatttggttatttttcattttatctagcagtgtgactaaagaattgtgtaaagttagcatgaaagacgtatattcatatgtgtagaaaataggtaatattccaggatacatgatgttttgtttggcaatgtcagtttgtagttagctagtcttgggaataaagtatcttttttccttttttgatctaacatttaacattgcttttcttgaagtcattcttattatctaccattgctttgacctcatttccatattactttaacaagttaagcccccaaataaattttagactatttcaggatataatcagttaatctatttttgtcctgggagtaaactaaaatctttttgtgattgttttccttttaaacagaagcaaggtatgtaggttgttagttgaattgacagttaaaatatgaaaaatgtaactctagtgtgttaatttgaatatttaatttctagtggattagggaagttacttactttttaaagatttcctatttcattttaaatacttaattcattggactgaaaaggaagttgaaatatatcttcaaagtaatagaactttaaaaagacacagatacggccaggcacggtggctcaagcctgtaatcccagcactttgggaggccgtgacgggcggatcacgaggtcagaagttcgagaccagcctggccaacttagtgaaaccccgtctctactaaaaatacaaaaaattagccaggtgtggtggtgtgtgcctgtaatcccagctactcgggaggctgaggcaggagaattgtgtgaacccaggaggtgtgccaattctttctgaaaatttttataactttctttggcagtttataaatgtcaccagcaacggatcttcattcattcatttattcttagattttttttcttctaatgcctagtgtgtgccaggccctatggatgcagattatagaggatatacgtacactagtgaaggtgataggagaaatactgatttaaaagagggagcgtatggaaatgatatgggatacataggaatggcgctaaacccaaacttgggcagggggagaatattgaagaaaactttacagaggaagtggcatataagttgagaccttacgttgcagtttgagggaatcagcaaggggacaaaggagtgggagatgggttgggggtgggatgtgaaaaagaaatgatttaggtacagggaagagcatgtgaagtcccataaaggaaaactttaagtttgaagatgtaaaaatgcaaaagcagcctcagaacgggcgaacagtggcttgcgaaggaagaaggggtgagagtttggagctggggagtcgaccttttgagtagggtttgcccaggatagtcggcttcatgcctgcagttccagcattattagtaatagcctttctcccactttcatttgtttccctatttgggtgataaattatatggccacacctgaaatcgtgagcttataaaaaagtggaaagccattgaaaggatctgaagcaggaagtgacatgtcactccctatgtagtctacagaccaagcttttgaggcattgggtggtgtagaatgggagaaatgcaatactgaatggaggaaggccagtgggagcctataggaataattcacatagagcactagcactttgggaggccgaggtgggctgatcaccggaggtcaggagttcgagaccagcctggccaacatggtgaaaccccatctctactaaagatacaaaaatcccgggtatggtggcggtggcaggtgcctgtaatcccagctacctgggaggctgaggcaggagaatcacttgaacctgggagatggaggtttcagtgagctaagatcacgccgcttcactctagcctgggtgaaagagtgaaactcagtctcwcacacacacacacacacacacacacacacacacacacagcacacgattgaggtcctaatgaaagagtgtgggatgggtggaaggaagcacgggggatgggcagcttgagggacaattgtaatacgtggtcttggaataacaaatagtttgggaaaaaatgagaaaagtcaccactagagtgaacttcaaatagattaaaaatttaagtgtaaaaagttgaaccataagaatatttttaattgaaaaaatatgtattagaagaaaatttgtaagttatgttatcatggaatagaaaagcatttgatccacaaagataggaatacacacatacagacacaaacatgcacccataaaggaaagaatattttaaaatccataagtgagattagaaggaacatttattaatatacatgatttatgatabccttaataagatgtgataatttattatgttcacttttactttttgcagagtgacttgataaagacttaaaaggaaacagaaatattcttttttgataatacrtaattgtatttttcattcaaattataaagaaagtagaagcccctatcgtcattgctttattagtgcggatgcatatcttttcctatgcttatatgtttttatttcttctgtgaattgcatgttcatatacctctagggataactgctcttggctggctgcattacctttcaaccctttctgtatatataaatattaaatgttttttcccagtatattctgtgggatcatagaatgcactacttaatgtsatttttttttcttttaatatttttggcattttgtagccttctctttgtgtcaacaaaattacctattttaacttacagacgaacctttgttatttctgcttttctgctatttaaataacactatgatgcacatcttttgtatattagaggattttatggaatattttgtcaaaatatactttaattaggacagtaaattattggggcatacataatgtttgtacattttacagttttgatcattgtttccagcttgttgttaagacagaccttctcgagcacctgcagtatagtgcatgagaaggcctgtttccctatgctgttgcaatttatatgcaattaattgcataagctcttttcgactaatattctttctctttttttgagacagagtctcgctctgtcacccaggttggcgtgcagtggcacaatctcagcttactgtaacctccacctcccaagtttaagcgattctcctgcctcagcctcctaactagctgggactacaggtgcrcgccaccacacctggctaattcttgtgttttttgacaattcggggttttgacatgttggccaggctggtcttgaactcctggcctcaagtgatccactcacctagtcctcccaaagtgctaggattacagaggtgagccaccatgcacagccccaactaatattcttttttagctttgctagttgagtaccactagaatataagccacatgagaatagggaataaaaattgcaggtgtatagcaggctttcattgagtactgtgtgattaaataatgattagtaaaaattttgtgtttttcctaatgacttgtgagtgacataagaatataaaatcattattatagatttctccttagttatttttctttaatcttacatgcattttctaagactgggtagaaatatgtacttttatatagtagaatttggcattctttttctttatgacttctgggcactgagttagcttggaaaggacttgtattcttcatgatgagtttacgaaaattgtctttcctattttcttttggctttttaaaaatgtgattttttgaagtttgaaattatcactctgtatgaaaatttggtgtatggtataagatgtggttctagtttttttttattcaagtggatggtaattttctcacaatttgatttatctttattatatatctgaatctgttttgaactcttggtttgattgctgttaatttggttatcttattgttttagtaattgtagcatgataccttctaaggccaaattcctatcattattcttgcaaatgtattttcccagaagaaatttggaattctcttttatgtcataaaaaaaaaccattgggatgcaattaaattttccagagacmgtggcaatttatttatttagatcaaattgttccttatataaccctggactatttcctgctaagtctattcccaggcctgatgtgtacgcgtgtgtgccggcatgcatatatttatatgtatacacacatctacacatatgtataaattaattttcccccatggtatactatttactgagtattttctaacaagtatgttgtttctatacagtaaacatgttaatttccataatacttattttataccaccttaccgaagtatctcatttaattttcaatgttattgacaagattttttaaaaatcttttcctgtttagtaattatagataatttcccccsttaccttattgccttgatatgacttgcaggaaaaaatgctcaaaacttgtagtaaaaacaggatatgcttttgtttttctgtacttttatggggatacttctgtgcttcctgttattaataagtatgatgtttgtggctggtttctgatagaatattttacaaagttttgttgtctcatttaaaaaaaataaatcagaattatgttaaattttgtcaagtgactttatggtacttatcaaagtgatcatagaaacttttttagttgttagcataaataactgcagatatttatgtgataaaacattaaattcttgggattaaaacttctttttgataaaagaagatttttatgtctaattttgtaatattttactttagtatttaaaaaaaatcatcctgagaccaaagttgtgctgtcatctttttatactttctggttaggttttacatttgggttgtgagacctttgaaaaagaaatgttacattttactatgtgttggaattctgtaaataacacagaaaactttaatacaacccttcatttggttccagtgccatctctggggaaagttttttgatagtgcttttaatttcttctgtagttattgatttaatccagctttcaagctcttccagaattacttcattatttattttttcctaggaaacttaacattttattaagatttcaagcatgttggaatggtgttcaatttatcctgttgatttgtatccaaagttctgtcccatttctcagtgctattaatatacatatttttctctagtttcttgctctgcataccagaaatgagtaattatctaatctctcaaaagaactggctcattattatcaattctatttttttttctttttttttgaaactaagtctcactctgtcgcccaggctgacgtacagtggcgcgatctcagctccctgcaacctcagcctctcgggttcaagcaattctcctgcctcagcctcccaagtagctgggattacaggcacatgccacccgcctggctaatttttgtgtttttagtagagattggggtttcaccattttggccaggctggtgtcgaacttctgacgtctggtgatccgcctgccccagcctaccaaagtgttaggattataggcggtagccatcgcatctggtctgatttttttctttatatctatctttgattagatagtgggctccttagctgtcacgcttgtttaattacaaacacatttaagagtatgcggctttctcttaaatttggtcaccttccatggacattgtgtatgtcatattggcattgatattaacttcttgattgtctataatacattttgataacttcaatatcctgacttatttaaatttgtgaggttgtttgggtttcrttttttatatttacagatgttaatttctagtttgacccatttttatcacaatatacaacctgttaacctttttaatataaaatttgtttaaaatgtttgcttgctagtttggccaayttttgcaaatatatgaaggaaaagaatagctatatggaaaggatttttaaaaaatttatatatggtcctttacaagtttatagacaaggttaaatatacaatgtgactgttcctgaaataagataatcattaaattaattgtaatagctaataagccaacaatacgaagtctttactatggagcagcctttttgccgtgcactttcatgtattatctctttaatcattgtgaagccctattaagtaggtactaatattaactcttttaaagattaagaaaattaaagctcaaaaacttgtatccagaaacgaaactggacctttaacagatgtttgtgtgtgtgtgtttgtgtgtatgtatgtgtgtttcagggattttctgtgttctgtacctaataaagaacaaaagtatatctttcttatttgttggaggccgaaagtgtgagggtcatgatcagctcagtataccactggaggttatatgagtaaacagcaaacttctcataaatgcaggatgtgggcaagctgacaactatgtccgctgcccagaaggaatgctgagggcattcatgccccaagctcaagtgtttctggtgattaggcataattgaagcctgttagcaatgatgtgaacctgtgatcagttaagcagctgaccaatcattacctcctccatgctctttctacccaataaatacaaagggtggtaggagctcaggggctgcctttgctcactagaagcggggagctctcttcttcccctggccctttccttaaaatagtttcttttgttttttgttatcatttctatgttcgtcccttcattcagtctcataatgagggtctcaggcagtaacagtggtaactgctgtaatgagggtctcaggcagtaacagtggcagtctgccacacttcatgatacacaggatggtcttcttatctttgtttytagcacatagcactgtgattgcaacattgggattcccagtaaacggaattcaatgtaaattattaaatgtttggtggaatttttattccattatagccttctttgtctctacatataagataattctgtacatttatatgacattcaaacttttctttcatagtctttaattcataatagtataagattgtgattttgttcattttactctttaggaatctcttgctgtgttcagaagaatgccaacacttttcttgtataacctgttgccctcaagtctttgatagttaggaaatgacttgtcattctgtaacaatagtgtcactggagaactgtcaaaaattgaaagattatacccagaatgaattgatcagtcaattgccatattgaaaaatagattattcttattagtcaataatgtctacaaaatccagttcaggaaaataaatgcagtataaaagaaacaatagatgtctgaaaatgtaaaagtaagtagccaaaggcctaactagattaattgaatgtgaatacttcctgcagtgatgaaataggcaaaatcaataatgttggtggcatttaggggcattgatggagggatsttgttctatatagagactttgtttctaggggaarcagagatagtcattaataaatcaaaaccacttctaaccatcaaattgccacattaaaggcaaattaayctgtatgagtcatcattccgggggctcacttttgataaaacagtgaagtgacatcatctctagaatatggcattataatttaggcagtcatggaaaatttggtagattttttaaaaggcaatnaaataagaagatttgttgtaatttttagctwccaaacattcacttaagagaaattactcactgcctgagcatgcaagatgaatgaagcttcattaaagcaagctgaaggaaaaagttaagctccttctggagggataaatcaatgttgctcatccttataagctagacacttaattctgtgaacctgacagatacttagaacataaagttgactccaggggttccagtgcagtgagtgcttgtgagtctgatgarttacaaggcctagtgttcaatttcctgcagattcttctgagcaacaggtaaacccatcagttgtgattggtggctctggcatatggaaacacaatttccatttaagtattgcctttttaaaggcaagtctgtatattaaagaataaaatcacctcagttaaaacaggataatggaatgcaaaattttagttgtccaaaattaaaaatgttgctatccaacaatatttgtaaaacaaagttattaaaaattacaaacttaatgcctatgaaattattttggaatgcagacatggaacaaagctaagtagaaaaaatatttagctgatgttcttaatattgcctgtcaattatcataattgcttcatttaaaaacattttattcagctatctctgttttactatgtgcaagatatgccatagatacacagatagtagatattcccagtgttctttattcctctgtatggacccacatttccatctgccaacattttcctcctgtctgaaagacttcctgtaacatttcttgcaatgcaagtctgctggcagtgaattctttcagcttgtgtatatttttcaaaacttttcaataccccttcatttctaaaagatatttttgctgggtatagaattctaagttaacagtatttttctttgagtattttaaagatgttgctccattgttttgtggcccacattgtttctgatgagaagtgtgctgtcgtttttaatccttattgttttatatataatgtgttttttaaatcttttggatgatttcaatattttcttcctggttttaagcattttggtggtgttttatgttttctttgtgcttgggtacattgagcttcttgaacatgtgggtttatacttttttcatcayatttggactattttctgccatatttctttaaatagtttccagcaactgccccctttctttggagatgccagttaacatgtatattaggccatttaaagtagttgcccagatcactaagtcctattcagtcctattcataatttctcagtatattttctccctgtgtttcattgtggacagctcatgttgcttattctacagtattacttttccttctgcagtatctatattaatctcattcagtgtacttttttcttatttcatactttccatatctagaagtttgatttgagtaatttttatatattctatttctcatgttcagtgtttcctttaactttttagagcatttgaaatacagttaaataataacttttaattttcttgtctgctatctgtgtaattttagggtttggttttatccagtttatcatctgtgtaatttcagtatttggtttcattgtttcatttttttcttcattatgagcagtattttctgctttctttgcatacctagtaattttgagtcattgtgagttttatcttgattaactaccagttactgtgagttttatcttgttggatgctgggtatttttgtgtttctttggatcaaccttctccaaccattttggcaccagtgatcggcttcatggaagacaagtttttccacagatgggggtttggggagtgatttcagtgtgattcaagtgtattacatttgttgtgtactttatttctattattattacataatcaccataatgtaggatcagtgggaaccttgagcttattttcctgcaactagatgatcccatgtagtggtgatgggagacggcgacagatcatcaagcattagattctcataagaagcatgcaacctagatcctcgcatactcagttcacaatagggttcacgctcctatgagaatctaatgctgctgctgatctgacaggaggcagagctcaggtggtaatgcaagcaatgggggacagctataaatatagatgaagctttgctcagtctctactactcacctcctactgtgtggcctggttcctaacaggtcataagcgggtactggtctgtggcctggggttgaagacccctgctatagatagtattcttgagctttattttgttatacagttaaattacttggaaacattttgatctttcagaggcttatttttagcttttttttaggtgagatcatagcattaaatcttgggcttattttttccactattgagacaatacccatcccataactcttctcagtgcctatgaattatgaggattttcctgctaactgatgagaacaagaactatttctgccctatgcaaacttcagggattattccttgtaatgcagtttctcaaccttagaattattgacatttatgggctggataattatttctggagtttaggggactgccctgtatatgaccaaatgtttaggagcatccctggcctcaatacagtagatggcagtaacatcctttaaattaagacaatcaaaaattgtctccagatattgccaatggctccaagggagtacaattgccctcagttaagagccactgctctaattctttctggtagttttcttatatgcatgccatggctaaggactttgctcaggactcaagggagacctcctacagatctcccaaattctgtatctgccaccctttcctcttctataggcttayctgagaatctagtcagttgacgtctctggattcccagctctgttttcccaactcaaggagacgactgagttttgcctgtgtttctttttccccatcacagcctggaaactctaggctgcaatgctggggcagtcataggctcacattgtttcctgtctctcagtgatctctgtcctttgttgcttgatacccagcatctttgaaaactatggtttcattatcctttatttttatttatttttagtttctagttttttcaggtggattcctgttaacctcatcttggtcctcatctttattcttgaaagatacttttgctgggtacacaattctggactggctattattttttctragcactttgaaggtatttgaactgtcttctggtgtctactgctgctgttaatcagctgtcaatcagttttcttctttcctttctcatgatctatctttttttgctctgagtacttttaggatcttctctttgcctttgccattttgtatttctgctgtgatgtattaagcataggtttctttttatctttccttgttcctaaaggatatatcaggcttcgtgaaygtttagagtctttctctcatcacttctcaaaaatttgcagccattatcttctcaggtattttatcatcttgatgttgtttatttcttccccattaaaactcttgttggatacaaaaagcatgaaccacaaaggaaaaaaacatttattgagctcattaaaattagaatcctttattgagcaaaaataaccaagaaggagagtgaaagggcaagttaccaaaagggagaatgtatttctagcacatgtaactgataaagactgggtccagcataytataaatagttcttacaaattaataagaaaaagacagatgcaatagaaaaccatgcaaatatcttgaggaggcatctcaccaagagacacacatgcccaataaacacaaatgggtttcrttctcattcattttaagaaaaatgaacatttcaaccacaggagataccgctatacacttggaatggccaaatttagactaataatgtaaaatgtttgggatcatgttagaaagctagaactcacatttttagtagaagtataattgaaaaacgctactaattttgaatgggcttactatatatctatgacccagacattctactcttaaatatacttaaatarcatcatatatatatgcatcaaaagatatgaaacatttatggcagcattatttgtactagccaagaacggaaaacaacccagatgcccctcaaaggcataatgggtaaagaaattgcaacatatttatatgttgtaaaactatatagcaatgaaaaatgaattccttctaccataagtaacagcatgggtgaatttcactaacttaatattagggaaaaatgaatactcacttgtaattctaattatataattttcaaataaagggaaagatcrccactttggggggtatggagggcatgatgactaggaatgagcataagtgggggccactggagtttggttaatgttgtatttcttgttttcggggtgtttatttgggcatattcatttttgaaatttatactatacacttatgatttgtactttttgtatatatgttatagtcaattcaaaagtttgatttaaaacagacactatttgccattttagagcttctgtttcagtagacagcaaatataaaccatataaacataaaaatgcacatatgattataaattatggacatgtatgaaggcaaagaacaaggtgctatgggattgagtcaccaggggatctgcttttatgtaatgttttggccagacctctatgagaaagagttattcaagttgaatgaggaggagggcagtgtaagataaggttggagaggcatgcaggacttttaggacatcctggagagtttggtcatcccaatggatgggcaactttagaagggctattaaggggtagttatgtgatttaagtttttaaaataatcactctggctacactgtgaattgcagacttgaaaatgggccagagttgaatgctgctgaaccatttaaagatactggagtgctccaggcaaaaaatgatggcatccataatctagaccagggacctgacagctttttatgtaaaaagtgtgtgttccacctgctaaactttgccactgtagcatgacagcggccatagacaatggataaatgaatgagcatggcctgtgttccagtaaaacttgatttacaaaaacagatgttgtagtttaccaatctctgatctaagtggagaaaagaaaacctttaggtgcagtggctcatgcctgtaatctcagcactttaggagtccaaggcaggtggatcatgaggtcaggagttcaagaccagcctgggcaaaatggtgaaaccccatctctactgaaaatacaaaaaactagccaggcgtggtggcgggcgcctgtaatcccagctacttgggaggctgaggccgagaattgcttgaacctgggaggtggaggttgcggtaagccaagattgcaccactgcactacagcctgggcgacagagcgagactctgtcttaaaaaaataaaaataaaaaaaatagctgggcattggggcatgcatttgtaatcctggctactcaggaggctgaggaattaggatcgcttgagcctaggcgttgaggttgtagtgagctatgatcccaccgctgaactccagccagcgtaacagagcaagaccttgtgtctaaaaaaaagtttttaaaaaatagaatatatattggttattgagaatgtcagtaagaggagaggattcaaggatggcttgagtaatttatgaatagtggtgttkcttattaggggtcaagtttgttgaaagtccaaaactcactcatctaaaatagtgaattgtgacatgtcaaagttctggtgttcttttcatctttggtgtagaattacattcttttatacacatagtagtcaccaattacacacacaattaaagtgaggaaaaagacaaaagaatctgtcatattgatcatcattgtattttctgctaataggagaaaaaatagtaggaaagaacaaaatatagaatattctcagactctatttgacattgcatctttagccctcatgttctcccttcccccaaaagtaacatcccccgcactcttgccccaaattgctacctttttaaggataaaccagagaatgtacaacttagaggagattatttgttgattctttacatacatcagtgacactggggacagaggtggctgctaagtagagctgctatctgctctctggacaagcactgtttcccattccatttgtaagaggaacctattcaagtaattgtcttattaccactactatgtcaaaaccgtaacactgttttgattttccttatagtttgatgtgtttgaaattttatatatattacatataatatataagtatgtatatttacttatttaaatcaacctttgaatattacaggctttgctctctgtacatgatactgtggctcagaagaattacgacccagtgttgcctcctatgcctgaagatattgacgatgaggaagactcagtaaaaataatccgtctggtcaaaaatagagaaccactggtgagttttggtgctcagatatgagtagataccatgatagggccaaatctgatggtgcataccatgtataactctttaaaatatacttcctctatgttcttaaactttaaaagaaatggaacattgatgtctaaagaacatgcttttgaaaaatgaaagtgaaggttaatagacattttattggctacatttaaatagcaatgattttgaaaatgtaacctgttgacatttatgaaagaaggcgtaacatgtaccaagcatggttgatttgagattacatggtacaacttaaaaaaattgctattgtctatgggaacgcaactttaagttattttatatacttaattcaattgctttttaaatttaaactaatttacagcaggtccaacaaaacttttgagaagtctcagtgaagtaaacatctaatttctttgttaaacatcttttgaagatcttatttggtcaggaggcgtggaacttaaatttgtttaatttaattttattttatgtccaagtagctctatttttaaaaataaaaaaagcttaatatagaaaaatagaacctctaatggcaatgaagaaatttccaaaattatttgttagctattccttaaataaagtattaagatttaaaatgtcattttaaatattggaatatgaaatcaaatgaatagaattacttgtcttgaaatttttctcattcaaatatataattagtgtattatcttygcaattattgttaaggtaaagtaagattattgtgtgaacaaatttaaagtttaaaaaatacactacccagaagaatagaaaatactttcaacaaatttgttatttaacatcagtcaaatgacatttgttagttcggggaattgttggagaagccacaagactgtcaaagcgcaatgaaaaacacacagagagaagattaagagtcaaagatatctttaggagaatgagccccagtcgtgagaatcagaagtaggcaaagtgctggaagctaagctgaaataaaattctagcaagtggatggtcaggaaatgcttggcaagtgattcatgaggaaaggctgtaacgtttggcaaccaagggataggttaccagtgttatctaaaaatgcaattttgtttattgggatccataatgtggtgacatgaacactgagcttgcactggatgacctaagtgggagttgggatcctgtcactttgccctgtatcctatagagcaaaccactcaccatctcagcctcaggttccttatcagaaaatcaggaaatgtacctctttgcaagtgtttttgaacatcagctaagatataatgtgtttggaatggtttatgagttctgaagcattatgcaaacattatgtaaatattagaatatattctatctaatatttaaaagatattagaatatattccatctaatatttaaaagatattagaatttatattctagttaatacttataaaagctaggttgcatctgctcaaggagagaatggttacctcagagaacaggctgtgaacacaggttatgtgggtattagataatggataggaaaaagggtaattacttaaggggcaagatcccttgaaaatgaaattctgtttgttggtgagtagatttcgatcctaaattctcagtgttacttgcatcggctgtcctcttgcttccttgagaacagtggttctcagattttggtattggaagaatgacctgagatgcttacttacaatgcagatttctgagctgaatcccaagggatttatatcaggagggtttttttggtgcctgggaatcttgattttaaaaagcgtctcagatgttcttggtgcaagtttttggtagatcacacttcaaaaacacttgtttcaaaggctcaatctgaaattcactgtgccacctacttgaggagaccttgcaatacggcagtttataggaaataaataaagtaaatwttttttttttttttgagacggagtctcactctgttgcccaggctggagtgcagtggcgtgatctcggctcactgcaacctccgcttcctggattcaagcaattctataggagataaattttttgtttaaggaaatcatgataacccagtaagcagtccccttttataaaccattttacagaattaataattaagaaaaatctgaccagaatttattttttcaatctaacttgaaattctccatactctgtttttaaaacaaaatcacatagartaaattcaaaataattatgtaggaaaataagtaatttttaaaatattagatccaattttaatttattttgtgttggcagactatgctataggattgatgacttttgtacagtatcacgtgtaatgtgctctgtgtttttgagatttgatcttattttcatggaaatatattgcactgggaatacatcaaacaattgtggtaagagaggtttggaaaacaatatggaaatagaagtcttcaagaatgaagggttcaaagtgaagattgattcaagtggtagtatcatgtagaaagtgagagattattcttcaagtctgtagtttaccctccaagcaaagtagaatcaggggatagcaagaagattctatcagggcacttatctctgtctataatgagacccttatgcgttggagtgctttgcattatctayacattccaaaagtgattttattctgcccatggctttaaaaagcgtctatgtgccagagactcccagggttatttctcttccagtcttttcttctaatctttaaattcgtatatccatctgtctatttgttatctccatttggaggtctaatagacatctcaattttcacatatccaaaaataaactgctgatctttgtccccaaatctgttccacccttgtcttaaccccttttagttgatggcaattccatccttccagctgctcagccaaaagaagttgagcctatctttaatccctctctttcttttgcattccataggcaatctgttgggaaatcctttagactccaccaataatatagccagatcccctttcatcacctctactcctgccagtcagatccatgccaccatcatctttcccttgaattactgtgcagagtgagcatcccaaatctgaagatctgaaatccaaaatgtgccaaaatctgaaacattttgagtgcagacatgagctccaaggaaatggtcattggagactcttagatttcatattcttggatttgggatgctcaaccaataagaatgcaaatgtgcccaaatctgaaaagaaaatctggaatctgaaacacttctggtctaagcatttcagacaagggattaacctctcattaatttcattgctttagcccttgccatccttcactcttagcacagtgggtggagtggtcctcctaggttgtgcccctcctgctgttcacaaccttgcatgttccctctttcattcagagtaaagcccagtgtcctcacagtgactcataaagcacataagctgactcccttctgcctttacctcatctcctcttgccgctcctctgctactgggctccagccacacaggctgccttgctcgctcttgagcattttattcacagccttccccttggcacctttgcactggctgtgtcttctgttccttcccattggctaacttcttcacctccgtccagtctttattcactcagacatcatcttctcagtgagtcctgtgtcttcacattgtctttcctccgcctgccctggcatcctggtcttctatttcctgccctacatcccctcacacccccacagtgtttaccacctgatagggttcggctctgtgtcctcacccaaacctcatcttgtagctcccataataaccacgtgtcgtgggagggacctggtgggagataattgaatcacgggtcagrtctttcccatgctgttcttgtgatagtgaataagtctcacgagatctgatggttttaaaaacgggagtttccctgcacaagctctctgtttgcctgctgccatccatgtaaaatgtgatttgctcctccttgccttccaccatgattgcgaggcctccccagccacatggaactataagtccattaaaccttcctttcataaattgcccagtctcaggcatgtctttattagcagtatgaaaacagactaactctctaacatactgtataatgtatgtaattattccatctcttgtttattgtcttgtctcccccattgggatgagaaagcagacatttttttctttttcatcagtttattataagcccttagaacggtgccttgcacagagtaagttctcaataaacattggtcaacttcattgaatacagaataagtcaaaggaactagcattaagtataacaaacaggttagatagccctatactgaaaaactgtacagtccatagtacagagagagattggttccacttaactaattctatgttgcaaaccacggctgtatgttgtggcgaaaacaatattattttgggggttgatgagctcagctgggaggttctcacttggagttcctcatacatacagtcagatggtggtggctggagtgaactgagggctccttcatttacacaactgttacctgggcttggagctggaaggttgggggctggccaagtgtctctttctctaattgttacctttacttggctagcttgggattcctcagagcatagcagtggtcatgatttcttacatggcagtgagattcgcatagagcaagtgtttcaagaggcccaagtggcagctacagatcttcttatagcctttgaagcctcaaaaccatttttaccacttaatgtgggaatatggcatgcacatacaaggagggaaggaattggtgatcccccttttagagacaatctcccccaagagtaatgaactcatagacagaatgaacttatgaacgaaaggttatgggaagatagaggttaagcagtattggatgatgattgagatgaatgattgtgtctctggtcagattaccttaaacaagtcctgatttttccatatactagttatctgatcttagacaaattacgaccatttaatattcagtttatcatccagaaactatggataagtaaacttagattactaggcttttctgccgttgggcatatttggtgggaaaatttgagacatgtcattaaggaaaatgaaagttgatttaatcaaactaattagttatattgagaatattacatttccagtcattttggaaacaagttagaaattgaaataaaagcagaaaatactagtagttggtgagtctaagctttatgaccatgaagwgatgctcattcaagtctctggccttgaatacatgcacaggtgatgaaaaatgccgtaaaatgcctgtcacttaattctttgacttttttactattattggctatgtatctgatagttatagataaaggatacttattacagatggacttttactttgtttacatatctgttctttaatgatataaatgtgtttattgacaaactggagaaaaatttcacttcttttggatkaattctgctgccactgaaaagcatacctttttagcagtattatgcaatgttggatggctttgcaaaaccaatgccagattcttaaaaggaaagtcatggaaaggctttcaaagtaaccacttgtgcctgttgttcttacaaggcagcagttaatttgcttctgagtatctgtaagtgaagaatttttggcttctttttgagactgtttcctaatcttatgccaatacttagttctatttgtactagttacaatcctagttcactaaaaccatggagtaagagctctttcttctaatcatttgtcttagacttaggcaacaaatataactaatttctgggttttaacttttttctttttctttataattatcgcccaagttttttttaatttttaaatttttatttttttactatgataactgagggtgatagaaggatcactgaactaactaaaagtcaaatgatctgggttttagttttttaacatayagaatcttttgtctattagtgtaattgtcactattccactttcttgatgcggtactataaggatgaaatgaatgaagaattgctttaaaaggataaaaaccaaacagcattgaaatacaaggtatttttataatggaaagaagrtatgtttattttacacagttttgaagaggttgaagatttcaaaaatccttaaattgggctgaaaccctttgatgctatgtagatagaatttcctctatttagtcatgagaatagacattctaagacaaatggcatgatgtctatttttcctgcctcatttcttttttttygtttttgtagttgttttctcttttttcagatgaatgtccttatttcctccttttctaacacctagtacacacatttacccacaaatgctttttgtttttgtcttaaaagggagctaccattaagaaggatgaacagmccggggcgatcattgtggccagaatcatgagaggaggagctgcagatagaagtggtgagactttaaatgttaaccaagtacagactaatcacgtgtttcgtgtgtagcatttccagtagataactaagaggataaccatctttggatctaatacagcagaacaagtaataagatatttttctctgtgttgaaatgtgagagcctatttaaataaatgatagataaacattactctatggtcttcttgtacacaagcatccaaagctatcttaaaacttgtgggccgggcgtggtggctcacgcctgtaatcccagcacttttggaggccaaggcgggtggatcacgaggtcaggagatcaataccatcctggctaacacggtgaaaccctgtctctactaaaaatacaaaaaaaaaaaaaattagtcaagtgtggtggcgggcacctgtagtatcagctacttgcaaggctgaggcaggagaatggtgtgaacctgggaggcggaggttgcggtgagccgagattgtgccactgcactccagcctgggtgacagagcgagactccgtctcaaaaaaaaaaaaaaaaaaaaaaaaaaaatcttgtttcttctgtatttctcaattgaaaagtactgctaagagcatgcagcctttaagataaataaaaattattttattagtatattagtataagatatcagtaatgtgcatttctagacaaagaccaagctcctgttaccatttcttggccagcattactatgttgtggtttttgagtcactgctatggagaggcatagaggctgaaacctgagatgtgtgaaggtctcctttccattcgttaagtgtattaakggaacctaacaatgctttacttatggaaacagctgcaaattacagttttggttgtgggtaacactgctaatttaccaaatctcctatttctcaggtcttattcatgttggtgatgaacttagggaagtcaacgggataccagtggaggataaaaggcctgaggaaataatacagattttggtaagctgtaaatttcttttaaaggtacaataaaaataaaatcgaatcactgtatttcagacttttagacttggtttgacatagacaggatttgtattaagcagtgcagggttcgaacacttaatccctgtgtgttcttggaaaatatcttaatctattcatgcctcagtgttttcatttgcaaaatgagaataagaggtaactatccatctggagtgttttgaggattaaatgagatagtatatataaagagttttagggccgagtgtggtggcttatatctgtaatcccagcactttgggaggctgagacaggtggatcacctgaggtcaggagcttaagaccagcctggccaacatggtgaaacccgtctctactaaaaatacaaaacaaaattagctgcacgtggtggcagtcacctgtagtcctagctacttgggaggctgaggcaggagaatcgcttgaacccaggagatggaggttgcagtgagtcgagatcacaccactgcactccagcctgggcgtcatagcaagactttgtctcaaaaaaaaaaaaaaaaaaaaaaaagaatttagtacctgtccctgtcccaagtctatacttagcagatggcatctacactgtggctggtgatgcatttatctttgtcttcctcccattgacacagtcacattccatgctatagatcatagcaatacaaattagtcaaactaatttagatgtcttttgaaatctgacacttgaataaaattattttatgccttggaaatattaattctaaagttcatttgtaagataaaaggaagggaaactctcttttatatgtgaaaacatactggaaacctataccaactagaagaggtttgagtgtgtctcaaaaacagatctctgtatatatgaaaatttagtatatggttaaggtggcattttaaatcagtgggaaaacagtggaacatttcatagatggtatcaggttaatggcgcagaaaaaataaggtcaatccttgttttacacaatacataaaaataaattcccaacaaattaaataagtgcaaaaaaaacaaaaattgcacaataaaaggtaatatacaatttctataattataaggtagaaaaagactttttaaccttgatatgaaagtcaaatagaaaaataacagatgtgtctactagaattcaaaactttctttatagaaaaaaggtgccataaagaaacatcaaagacaaatgagattgtatgaaaaatattttcartatatataataaaaggctaatgtttcaaaatatatagagatgataaaaatcaataagaaaaacatttacagaaaaatcagcagtgcatatggacaaatactttacaaaagaaaacatagatgtctggagacacgaaggtgatgccaagcccaggscaggcttgatcccctcaaagcattttcaggatatgagattggaaagcttgataatgcctagagttggtcagggtataggaaaataggtatatttatatgatttggggatgggataaattattagtagaactttttgagatctgaaactatcaaaattttaaatgtgcataccctttagttggaaattaatcctcaagcaataatttggtaaatgtgtataaacaaaatttttcaaaaatattcggaaactaccaagaaagttgcgttgatcaaataatcattcatccatatgctagattattgtgaggcaatcacgagagatagacctatatggctcagcagtaatagtaataacaattgagtccttattaaatgacactgttgtaaggaccatagatccatttaaaaaaaaacacacagacacaaactagaaaaataagaggagattatagaaaagacttttgttttctctctaccaatgtaattcagtattacagtatgagaattctttataagatttgtgagcgccttctacaataagcaatagcaatgatattacmattttgaaataaatcaaccctttataaaattctattatttaaactatcagaatcccattttacttaacttgctgtgttgcactagagctgccttcttaaggctcggcccagagctgactgtgtgatgcaccatttcccaactcagctttcagcaacttcatgctggtgaattgaaattgactatagtgaaagtatttataccatggaaattgacagacagtacacatcagagcctttttttttttttaaataaatggagtcctggtttaccagtgcaccacagatagtgagactcagagatatgtcttgccctaccccccttcctttcatatctttcaaatgtgccaagtatttagtgcttttatggagcttacaaattagcaggagtaacatatcttatgaaataatggcataaataattaaatatggctacaatacatggtaaaaagagagagacagagaatgacatgagactatatttaaagagaaatcctatctgagataacaaaaacttgtgggtgctggtacttattttaatgaagttagaatagatactcagtcttttcatctttcaattaatctattacgttggatattttactcgctcmccagaatacaatagatatgaatgttctttattttttttttctgatgggcattgccactaattgaatcatgtatttgtaactgcactactgacattataggtgttttgtcccccaaaacatggatgctgatacttaaatgtaactgtatgaaccttgtacattattctttaaaaaaaaaaaaaaaagcttcttgctctgtcacctaggctggagtgcagtggtgcgatcacagctcaccgcagccttgaactcctgggctcaagaggccttagcttcatcaccacgcttggctaatttttaaaattttttttgtagagacaggggttttgctatattgctggtcttgaactcctgggcttgggtgatcctgccaccttgcctcccaaaacactggaattacagacacgagccactgcacccagacctttatacattatctgttctagtcattgaatactgtgtttatttaaggtgttgtgcatattttgtgtgtttctatttcgaagaaacttggatgggaatgtatttacttgacagcttaaaagtacacaggaagtaaaagtggatttaggagttaatgttttttaacttattctacaaacttcagagctttctttctcacattacaggaatttctacaaaaatagtttcctccgtttagtctatctaagagtagaagccccaagcttgtaaattttcagatgcatttcactttctacctattttaccttattcttccttgggtctggttttcttataactccttsttttatctgttaccaggctcagtctcagggagcaattacatttaagattatacccggcagcaaagaggagacaccatcaaaagaaggcaaggtaattattgcttaaaaacatttcttcgtgcgtgggagggaagtcatgtttttccatccaacacatatccactttgtcacaacacatttctttcaatattccagttttaaaattactatgtttggagtyggagttaggagaatataggccatttcacatttattttttatctttattcatctttaatgaaacttttcttccagatgtttatcaaagccctctttgactataatcctaatgaggataaggcaattccatgtaaggaagctgggctttctttcaaaaagggagatattcttcagattatgagccaagatgatgcaacttggtggcaagcgaaacacgaagctgatgccaaccccagggcaggcttgatcccctcaaagcatttccaggaaaggtgagctgctggtacataataatggcttttctccagctgaccttttgttctctgcaaaatatcattctrgcattgatgtgataaaatatgctataaaaccttgccttagaattttttatcctgtgggtttggatttctgttttgtctaactaagtatgatgaatgaccaaaaataatatgacagtactgggtcatattagatttttgttatgaagcaaatggaaaatagcacattaatatcttgaaaccatgttgatatgaaaggtggaaaaaaaaaagaccagtggttttggagggagggaagataatttacaaaaatttgaaagtgggcgatttgtttcttaatttgaatctattgcattacatkcatttttttctctaacctttaagttttttcttaagactaaatattttgatattgtattcacctcggacctgtgctgaaaattgataggtatgttgaccttctttctcccaggagattggctttgagacgaccagaaatattggttcagcccctgaaagtttccaacaggaaatcatgtaagtttgttaataagaatgcagagaaaccaaaccctgatrtttatttttgactattaaagcaggtgctcatggcagaacaaagggtcctattaccctagcaataactttgggatcatcagttctcaggaacaaacaaatatgagattcatatttggaatattaacatgaatcttttgaggaaaggggtggttgaggttgttaataataaatccatgactcactctttaagaaagtgactactactactactgtctttgatttccaaatatagttattttattaaatgtcacctaaaatacagctcttccttcttcaaagccaggaagtttgggttaggtatttcttggtaaagattagggagaaaaaaaatctaccattttcttgggtacaaaagcaattgtgctcaagaccaattgttcttaattcctttcttatccccagatcataatacttctgacctttagcctatccctttggagttattaccagactagattaaaagaaaatgagagaaagacaaaggatggctaccgtatgactactgaaaaacttagtgtgcatttaaatacttttttttctctttcagcctaatcttctgtcagcttttctttatttcccaccacccagctcttcaagtctgcatcccataaattccctgttccacctcgcctagatgtttcatggttctaggtattttaagaggaaaaaaccaaccctttgtttttagcatagaaactgtacattaaacagcgaaatgaccaaataaatggccctggaattttacaccaacatctgtttttagtattgttgcatttttcacatctcctgtgatttctgtcagtttgcagaagcatatagcccaggaatcacattagaagggagccaaactgtagtcgagtataaatctcacaagcaggcaaatgcttaaagtggagcactcattcaaaagcctgcttgtccttgctacattaagtctaggcacaaggaaaaaaacccttgtcacagaatgctacaagtcttctgacatcagaaaacttaaagctttcgtgagaatattgcactgttcttaagcgtgatgacttttcactggccaactcactaacagaaaggagctttgaggctccttgcctgactggctctcaaagggatttttaaataggaggcttacacatttctaatatatttggcatatgtgggataagataatgtgtcacttaaagatgaaataaatgtaattatactcgaatctggatccatactcaactctttttcagtcctaggcaacttagaaatgtacagtttgatattattataaattttcattgattgaaaatttttgataagtgtatatgtatttctttaaaagaactatacaaaagggatattttgctttttaatagctctttcaaactggtttctatatagatgcataggaaggtgaggtgtgtgtgggggtatgtgtgtttgtttgtgtgtgtatgtagaagtattaattgtaacggagtccttttgtatgttgatttgcatgatttcttttttatgttaatacttcaatatttggatctgataaatatttattctagcatttatctttactgaaatgtcctcatttgactaattttgtttttttttgtttttgtttttgctttttctgcctcttgaataccattcagaaatgtttgctggtcctcctctctttctttctcctctctctctgtctctcttattaaactagagtttgattcactgagagatgcattgtttgtttttatatatgttatttattttcaaataaatctggtcaaaattatccttattaaatcataaacatataacagatatggacttgttcagagagacaatatatttctgtgacaaataggcagctaatgtctttattctcaaagaattgaaattctacttgaaatttccttgaatattgtctcacataaagttaaaagttatgcataaatcattgtattgattctgaacattttaaatggcatttaaaaacactttaacctatgttttgatgatgattctttaccaaactaaaacttgtaaaggccatctgatccactactttctggatttcaatatttggtacttagggttttggaataggaaacttacgttatcatgccctttgttgaattataggaaaatgccatgaagaaaaacagcaagttggtataaaatcttttgtttttatgattttgaatattaatagaatagggttgtaaaaaaagtttctgattcaattaaaatttataaaggaagaataattctatcatgtcaatgtttataaatttattttaaaaatacagtgataaaaactttatccactaatttttacaagtgtacttaacatctaggaggaaattgcaaatataggatttgaaataatgaatttagtcacataataccatttacgaaattagccagttaactttttatacaaagtgattgctcgtattactcttttctaaatctttattttgctttttatttcatttgtagtgtatcaccataacttgagtttgcatgggggaaaagttcatggaagatggttctggaactatagggtttcagttaatatcaacatagaaataaataaggaagggcacatcccaatcttactgtctttgcatttttgcacttatatttgtgctagagctctagttcttggctccaaggtaagtaaaatcaggagccatgataataacaacctctttaggctttgaaactagcctccttatgcaaaattcataagtgcaagtcatattcatctttgttgcttggttatgtcctcccctaaagaatctttgtgtatctaatacaaacccagaagaataaaaaggcttttcaaacaaaaaaataatttacctcttaaaaaattcctgaaaactaaaacatgacctcttaaacctaaaatatttctaagtcttaagtagctggatataaggacttgtctcctccccctattttttggaagaattgcttaccgaacaaagatatttgtaatggaaatttgtttccctccctctccatcatctaatgataggttcccacataatggatttatattagtaatgcagagagaaaagcaggcctcaaagtctgatagattttcttttatatgaccagcttttagattattatatacaagatgtagcttaagtgttctggaaatgagtaaaagtgaatcttatgtctcagatagaatgtaggagtacttttgcatgacaggaacttggcagcttgcatttcttgtgtcaatataatttaaagtattctaattttctgcctaaaacttatttttatagtttggttgcatgtactacctaaccgttaagaaagaaataggaattcatttgtggtattgtttgttgcttttctattgaaatctaaatacaagttaagaattgtcttcctaatgacatcaaattaatttaagttcagtaggatgtgatttatattaaatatttaaatccagtatatattgtcttcagaaaggagtaagaaaaagctgttattcaggtagtgtattttacaacagaatattcaagtgtgagtttttatagtgttgtttcctttttttagttatcaaaatataagaacctaaaagtttctaatattgctgactgaataaccttaattcaaaatttttgttttacacaataactcttaaaaaattcttgcagtcaaagaaacaagaatgtacaatttttcaaccatttaaagattagaaaggaaaacacaaaatattttattgtagaatttgttttaactagtcatgattattattatgcaggtaaaaagaaaacatttaactgaagccaaagggtatccatttaagcaaggtgtaacttagttcattcaaaggcaaacatttgtcagttgataatcacaataggcaaaaaagaatttaagcattgagtaaaataacgaattcactgcacacggtaccggtattttggaatgtcttaacacttaggaataatatatcacaggatgctacaagtcattgtaataaagcttttcaagttgagtaagcttcttcttcctggattcttaagtaattttatttgttgttttcatacataaagttaattcagaaacaaacacattgcttatgttgttacatgaagtttgtatgtctaaaacattgtcaaacattttcttaatattggtggggtcttgtataaacagaaacacgtggggttttaaaaaatacctaacattggccgggcacagcggctcacgcctgtaatcacagcactttgggaggccgaggcaggcagatcacaaggtcaggagttcgaaaccagcctaaccaacatagtgaaaccccgtctctactaaaaatacaaaaaaattagccaggcgtggtggcacatgcctgtaatcccagctactcgggaggctgaggcaggagaatcgcttgaacctgggaggcagaggttgcagtgagccgagattgtgccattgcactccagcctgggcaataagagtaaaactccatctcaaaaaaaaacaaaaacaaaaaacaaaacaaacaaacaaacaaacaaaaaacctaacgtatttttcccctaatactaatactatctggaagatgccagagttcagagtttgggtggaaagaggtgtagatgaactaagttgtaaatttcatatctgatcacttaaatcgaagatggttgaggtgaagaaccttctaactgttactgctcacactcagtctcagtgaactgtgttctcctgggattccccaagatgttgcttctcaaacactatcagagtagatgcttctagtctttccattggaagcgttctcagccctattgtctcttgtattttgtcctggggactcaatgccatgcaggttggaaagcattggttaactcttaggggtctgatctgtggttgcggattattgcagacttttaggasggattgcggtagggggtggggaatttaggaaagtggtttctagtatggggatttaaccttgcccatgtgaataatagcacactaatatagacacagtttctccacttgtcaggagtgtcacacatgtcccttgcagagtgacatccagcagaatgggacgtttactactgcccagtgtgcaggactcaccacgtgcttttcacagaacctttctagttcattctcttaagacagcacatttatctttctctttaaaaaaaaaaaaggttttcctttttttgagacaggctctcactctgttgcccaggcttgagtgcagtggcaccatcatagctgactgcagctttgaactcctgggctcaagtgatcctcttgtctcagcctcctgagtagctgggactacaggcatgcgccaccacccccagctaatttttaaaattttctgtagagatgggttctcactatgtggttcacgctgatctcaaactgctggcttcaagtgatcctccttctgtggcctcccaaagtgctgggattataggcatgagccactgtgctcagccacattcatctttttgagatcttcttggcctcccctttgtcacttttctaactttcctctcctgctctaatgtacttgaagatagcagatggtggactcttgataacactggagagaggagctggccctccctggccactcctggcaggagactctcccttggaataccgaagctttggggagggatggcgggccatgggaggtcatgctaagtcagtaggaaacttgtaagaaactttatgtccctcgacctctctcctgcccatttctagtctgagacttgagtaatcaaaacatgattttgtcatgattagcatagcattgaattaaaaactcagactcgagccagatggcatgggtccaaatcccagttttaacatggacaagtgtgttgtatttttttttctttctaattagttcttgagctctctctagaaagtggctataaactctagccctgctctgatgcaggggaggtggtcgtggctgtctgcagtgtgcctttcttgggatacttctttctggtggaaggcctaatgcctaagtgtccacctgtgaccagatgtcctctctcataaggacttgattatattgacagacactcttggggctcttgtctgacctgtttccggtttattcctaccaagatagccactctctaggaatgccctgaccaggaaatactgtagattcaggtgtgctgggcaggtgagacacagaggaggcaacgtgaaatagcaggggtgcatgaaatagcagaggtagtgtattactcacagatcccagagaggagagcagtatacctcgcagggccaacaggaagaggggagttgtctgggatgcagactcaaccagtgtgtggggagcaagagagatggggggaccaaagccttcactggggtccaggacattacccaagcaagctttccttctgggagttctaaatagtgggtgtaaagaaagcaggcatgagttccgtggagttatgctgtgactgagaggtggtcactgcagcataattgcatggtccacgtggggtgtagaggtcacggagtgagtcaaataggctgtatccgtatgtcccatagtgaggtggtcaccagcaggcagttgtataaggcagatatctggatgggctgccttgaggaagtgggaggaggcagagagcttgaagccatgtcaagggcgactaagccctgtttctgatatgagaaagttaagcctggattcacaatggatgccaaagcaacataaaattatgagaattcactatagggttctttcttatctgaaaaaaatggggattatagtactggactcatagattgttggggaattaaataagtttgtgtattgtagtgtacacagaacagtgccttccacatagtaataatcatgtgactatcccaactctcttctgagatcaacgttttatatattttttcctctttgttcaaacttgctaagtctgagaaattctgtttccttttcttactggatgttcattaagcatgatacttgctactgaatatatgtgtgtggttatatcagtratataaaaatatcattttctctctacttaaaaattttatggagaaacattcttttgcaaatttatacagcatattcatgaaattttattagaatgtgaaatatgtactatatgtgatataaattacagatttttttgtggattggcattggtgttttaattttttgttggtttttgtggtatggcttttatcatttgatttccatggcgctaagtctttaatcgagggtgtagtatttaatctatcccattggtcctataaaaaaatagactctatgtttaacaacccactttataatggagtacctgagatttcaaagtgacccatctgatgtccatcatgcctagctgtttgcctaagccacatcatatcgtttatttcttgttttctaaccgtttgctttagatgcgcatgacaggtcagagttactaagacatgtgcttaaataaagtcacaacttgggtgattcaaagcacgagcctgaataataataatgatttgcttgtgatatttgctaatactggtcaaaccaagccaacatagtttaaggatccataggtatttgaaaaataaaaatacagtggtatacaccttcctggaagtgttttctttggccactattctgtagcttggatggatgaggggagaactgttctgatcactcctatttkctctgaggtcattgtagtgaaatgctttgtaccttgactcatagttagatttgcctctgtaatattgccagtattttttccacccttctgaaagcgagtctctgaagtcatatttaacttttaaattgctatcctcttagtaatttaggaactgtttaggattactttctaaaatacctttcatcagataatatagacagaataaaaataaatgattctgcataactcatttgatatgtatataacattgataattgtcaggttattgttaaatttacaggatatttagatatgttaaggacaaaatttgttgtttctaatatccttttttctttccactatttttatcgagaaatttcttttaagtgttgaacagattgatttacaaacaaaactgttctatgaaaataaatgtaatccccttattaaagacattattttgaaaaaaatgctgaaggtttttgttctggttatttttcccatttggttatttaataagctatgtaaggactatgttttgacaacttaagtgtatgcattctttttaaaacaaggctgcagtgcagcctaaaatgtagtttttcataaattctatttatttgttgactgataattttgaaacatttaaaatacatttgttttttcctttggctttgctaagatgaggaaacagttgagtgtggtaggtggwttttttttttcctttgggtgcaacatcttcctattctaattgcattttctgcacatttaatcatttcctttctcattttctttgtgcttctcagaggaaattaaaggtacatgtataataagttaccctgcatagtctagtcattttatttagtgcacatatatgtaggattaaattgaatataacaatcaacttacaaatgtactctgttgtacatccaaacttccatcttgacgttacaataccaaaaattgtggttgcactttgttttagaaagaaatatgcatttttttgctttatgcagcagaaatatagaatgtaatctgaaataatacattatatttttattctgtcagtagtcttaaatgtgaatgaaataaacagtattattcaaatgtattgacagacgtattttgatgtaggatctaggggaaccttctcaattaatttatttctgtgcagtctatgctgctagttccacaagaaagaggcctaaaatattaagtaccccactacttaaataaagtttttaagatatgtatagcctagtattcatgtgacttaaaaatactagcacattgcttactttacaaatgtttttatcagttctttaaaagaaataccaatatttcattcccctgttactcccaacatgaaatctcttcttatcaatagaaaggacatattttcatcttaacctttctgtctaatccaatgagccaaaataagtgctgtatttttacctattatctaagagcctgatttacaaaartaaatgtactttgggggatcaggtggcatcattttcttaactttaaaaatataggtcgggcgtagtggctcacgcctgtaatcccagcactttgggaggccaaagtgggcggatcacctgaggtcaggatttcgagaccagcatggccaacatggcaaaaccttgtctctactaaaagtacaaaaattagccgggtgtggtggtgcgtgcctataatcccagctactcaggaggcagaggcaggagaatcgcttgaactcaggagcggaggttgcagtgagtcgagattgcaccattgcactccatcctgggcaaaagagtgagactccatctcaaaaaaaaaaagaaaaaagaaaaaagaagaaaatataaacctctcagacaagtctcgtataattttcttggaactgcatcaagaaaccactgaagaaagttggaggaattaaaaaaaccctgcatgatgtttaaaaatatcactttaaacttaaatataaaacaaactgttttatgtttaagagtggcattgcaagggctgttctatgctgtgctttacctaattgttttaagtgttttttttttttttttttttttttttttgcgtctgcggctggccttctaactgttctgctttatttcttggcttttgttctgtatgcttttacactccatccagaagatgctgactatgctggtaacaacagtggaacctatataggtgagcacttggccacggaggaggatctctttctttctgttgctttcctcgaagtcattacctcgttttatctgaaatgagcgcatttgcactcgcatgctctgagattcggtgggggtggcatgcaccttcacgttacacaggctcaatgggctggacacaaagggtttcctagtgtgctttggttattatattccggaaacgttgccagatgccctatctttatattaatctaatttatatttttgatataagataaaaataattgtataatttttgatagacggtggaaaagcatcctattggcactaagcaattttacacaattaatggcatctggacttttctaattacctagttaattgtgaattaatcaacacttctaaataacctttttcttcccgacaactttctgcttatttgttgttgttgttgttgtttttgagatggagtctcactctgttgcccaggttggagtgcagtggcacagtctccactcactgcaacctctgcctccggggttcaagtgattctcctgcctcagcctcctgagtagctgggattacaggcacccaccaccacgcctggcttatttttgtatttttagtagagacagggtttcgccatgttggccaggctggtctcaaactcttgacctcaagtgatctgcccgcctcagcctcccaaaattctgggattacaggtgtgagcgaccgagactggccactttttgtttatgcttttttatgacttcttattcccacagcctcctcctaagtaaacattgactgaacagccccaaatataattaagccttatgaccaactttctaatctgtactggcagggaaaaattctagtttggagatgccgagggttgttatacacgaaaatatttagaaattgctcaaggcattaaaatgatcttccccaacattttaccttcaaattttcccactcttgccacatccaggcatcatgacaaactctctacttttagtagtgagagggaatgaatggtgaattttattttatattattttatattattttattttattttattttattatttgagacagggtctggctctgtcacccagtatggagtgcagtggcatgatctcggctctctgcaacctccgcctcccaggctcaaaccatcctcccacctcagcctcgcaagtagcttggactacaggcctgcaccaccacggccagctaatttttttgtatttttggtasagatgaggtttcaccatgttgcccaggctggtctcaaactcctgagctctaatgatccacctgtcttggtctcccaaagtgctgagattataggcatgagccactgtgcccaaccagaaacacatttagagatcagctgcttcagctctcttattttaagattaataattatgtatgatgataatatctcctggttattgaagaaatgcaccagagcctgtatttggtatttactgtgtattttctctaatactgtgaggttagtggtattgtatttattttaagaaaaggaaacaaaggtctagaaagtttacagtatttacccgaggactcaaagatggtaaatggagcatcctgaagtcacatccccatctgcagagacagaatatttgtactgtgtcttttacaattgctgccttttgatttttcattttacaaaacaaactagaaaaccctttgcagacatatggagtatttcaatttctaggctagagaaaatctactaagtaagaattggatgatgagagagattttattaaaattgtattctttactcatttcagaataatacagtgtgccagataccyggtacatccattaacacctccccctacatcaccagaaactgtaatggctttaaacagcaagcatttattctcatgatactgtggtcagcagtgtggttcttctggcctgggtcagcttggtggatctgttcaggctggggtcttggttggggtctggttggtttgggggtgctcaggtgggtgaacttgtttctgtttcatggagtgtttcacctttcgcaaagctagcccatgcagtggtttcagagttccagagaacagcaaaagaaaacagtctccaggatgtaaatgctcaggaagcctctgcttgcatcaaatctgctaatatctcattggatgaaacaagtctcatggccaagccagggttactgtggaaggagaccccctgagagcttggatacagggaggtgtgaagacatggatggccatcactgcatgcttctgcttctctcaaaaatagaaagaatggtacctgctccctaactttaagggcctatattcagtcaatcagacagtagggattatagaaaactgtggcataaagcactatctgatgactgtcacataaaatgctgtgattcagagaaggtggtgatcatcgtagcctgaagcaaccagggacccagtcccacaagagaggccattagagctgggcaccaagggttagctgtaattccaggtagcatgggggataaagatagaagaaaatagcacggaaagagcactggacatatttaagttcgatgatatgtagatggtgggcctggaaatttagtttggtactggataaggtgagatcataagttttaggttaagtaattgacacatttattaaagttttgccagattttggtactcagtgttattctttgtgtaaaatttcgtccaaagaacaaaatatggattttaaatctgtgtctctcttctagcatttaggagttttgtaaaatgagtatttaatcagtagatgtattatattatacattgatgtgcaaaaggaaggggtgatcagaaatatgggtttctttagagcacataaagacaatgagttctgacaaaatgccattgaatttggcaacgcggaatcactgataacatctgagaaacattttcaccggaagccaaattgcaaggtgtcaaggagtgacagagttgacagcagaggaaggattgccgttgagtccgaggcagtttttatagttgaggataggagtgctccagtgggagagaggataatatgatcatttttataggcagagatgaccgagccaatggtaaagaattgaatatctgaaaaaggaaataattgtggttaactgtaaatgattcaaagcttctaaataactttttctttcaaatatctttttgattatgtttccttatgacttcttattcccataacccctctaaataaccgttggctaaacagcccccaatataatcaacttatgattaactttctaaggaaatctccagtttggagatgccaagggatgttattaatataaacaaaagcaggactacctagaaattgttacaggcatcttatcttcacctacacttctcttctgactttctccccactgctgtagataggtatcctggtaagttctctgcttttagtagcgagaggtaatagtctagaagcacagttttagcgatcaattccgttagagaaaaaagtccaaataagactagattgggtggaattaagactatgggagggtttagataaaataatttggcactagcaggtgaagttaagcatacagatatcccatggcccagcaaaattatttctttggaaaaggtgatgagctttgtgcttccaagagaccattctacatcagacaattatagaagaaaacgggaccatctaagtagaatgagaatagcatgaatcatgtaataattcatatcaaactggtggctcacagacactctgcagactgtgttgggacaaagatccatattttttgttagacctacaaactgagaaatttcatatgaaaatttctggctcatttggcagaacaaaaggtttgtgcaaaataggccttcatttcccgatgttaataattagctgaggcagagcgtggtgactcatgcctgtaatcccagcacttgcactttgggaagccaaggccagtggatcatctgaggtcaggagttcaagaccagcctggccaatgtgacgaaactccttctctactgaaaatacaaaaattagctgggcatagtggcgcacacctgtaatccaagttactcaggaggctgaggcaggaggattgcttgaatttaggaggcggagattgcagtgaactgagatcgcgccattgcattccagcctgggtgacagagccagattctgtctcaaaataataataattagctgagctgcattataactgattccttaatggagagattaagagcacttcagttcatcgcagtccacaccattcctcattacttgccaattctgagacaggttgtcagttaccattctcctaacagttgtactggtgcttgtgctataatagcaaagtatttctttgtatccatattttcaaccatgggaaagtaaaggtaacccaagagtatttctagaaaaatgagacaatatgtttcttcaagggctgatgttgtgcaaaatgtattcttattggcagatggataacttaaggtctttctgcctacctggctttgacagggtttttgcttttttttttttttttttttttttttgagatggagtctcactctgtcgccaggctagagtgcagtggcgcgatcttggctcactgcaacctccgactccctggtttaagcgattctcctgcctcagcctcccgactagctgggattatagagtacagctattcactccattcaactcttggtcttagaaaaaatagcttcatttccatccttgagtatggcaaagggagaaatgtgaccaatgtgttttagtatatgtgcaccatgacagcatttctttatgtcctcctggtctaaatacttattctaatgtgtgcaagagacaaccacaaggttagtgcacctggaagttccttgagataccaccaagattaggaaacctaggagggtacctgagaagagagwcatacggtataaaaagacttttaaaaagaatacatccttccacagtgaaataataggacagataaatgaatagtgttgctgataaaagtatcttcttttatggaagcwgttcaactaatgaccaaagatttgacgttagttcttttgtagaataagcaagtttgatcatagtctctcatttaaaaaagaatatattgctaaaaagttactttgttacaaatagcttgagaaaattatcttgtggaattctrtttttcccccaaaagccaaatcctaaaaatgcctacagatcttatgtgtttttaaaacaaggcttataagcaacatgctaacataaatggcaaaactattctatggtaaacatatgtatttaaaaaacgtgttaaaatgttctgtgacttatcgtaattgtgggactttttagtagttttcctcccaatcccacttgttttttcctcttaaccatttctttgcccccttttcttgttgggttattcatcagtcttctgttaatttgatgagctctttttatattatgaatattcatcccttctctgttgcccacattttcttctggtcttctggttgtgtcttaactttttctttgctaaattttagagcatgtaggtatttttcttttcacctagccaaatctgtgaatcacttcccttttgtcttctcttttctttttgtattcctcataccaaaattacttaaaataatttaaaattatatgttttctccaaagtactatatgcatttggttgaagcagatgaaattgctgttttgtcagtcaaaaaccaataacaatgccagcaatttcacatggttccatttaataaattgtttgaaaagtcaaatagtattgcaagtccagcaacccaaagcaggagtctcctttcctcctcctcctccccattcctatggcttctctcgagagagaaccaccttagctctggttgccattttcttctggtatttgtagcatataactttcttataatgctatttctggattttataacaatatttttgagtgccttttacattctagatgctgttctgggcactggagtttcaacagaaatcaaaacaaacatcctccttttctagtacttttgtgttgggagtaggagtggagacaaattgctgaataattcgttagatggtaataagtgctaagaagaaaagtaaggtggaaatgaagatggggtgatgagggagctggggaaatgggcatttcaaatttaaatatggtggtcaaagaaggcctccttgagaaggccacgtttgagcaaaaacctgaagtgagcttgttgggaataagcattccaagcagtggtacaagcatgtgcaaaggccctgagacaggatgcatgtgttcaggtgccccgacagcatgtgcaaaggccccaagacaggatccatgtgcacaggcccccaacagcgtgtacaaaggccccgagacaggatgcatgtgtacaggcccctgacagtgtgttcaaaggcaccaagacaggatgcatgtgcacaggccccagacagcgtatgcaaaggccctgagacaggatgcatgtgtacaggcccccacagtgtgtgcaaaggccccgagacaggatgcatgtgcacggtctgaccccccaacagcatgtgcaaaggccctgagacaggacgcattgtgcacaagtgtgtgcaaaggccctaaagatgggtcaagagaccagagtgaccagagcagagtgaatggggagagtgataggaattgaggttgtcaagataatagaatgtttgtgggaggaggaactttggctcttatactccagatcattgaagggctctaagcagagccgtaacatgaactgccttctgtgtgtaagggtcacrctggctgatctgttgggaatggattgtaagggagaaacagcagaagcagggagctcctgtagtcattcaggcagatgatgatggtggctggaagcagatattatctgtggaggtggtgagaaaatgtcccattctggatatattttgatggtagaactgaggagatttccctacaaagtggcaaaccaaggatgggtgtatsgtttttggatttagtaactaygaagatggagttactatttactgagatgggaaagactgcagaggagtaggttgggctgaggaaaagttcagggattccatttgaggcgtattgagttgacatccaaatagagatctatgacactccaagatttaaatgccaatttttatgagaattatactttaaaaccatatttaataagctatcactggtgtgaaagtacactatgtggtatgattcttactgacctgtaacatacctcatttcttagaggttagcatgtttattaatgaaagaggtttggctgttattattaaaagaaaggaaaaagctcactgggcaatggaagttgtatgtagtttgcataaaattttgtaataatccaagcgcagtggtgcacacctgtaatcccaactactccggaggctgaggcgagaggatcacttgaggccaggagttcaaggctgcagtgatctacaatgatgccactccagcctgggtgacagagcaaaaccctatctcttaaaaataaattaaattgtaataataacatgaaggtgaattgctagtatgctgtaaacatgaattgcatgaattgcagaaatttacaccatttaaagttgaatgtccgcaagtcaagggctgcctgtatataaagactgtcaaatcatatatgtttatatatgtatatgcttgcatatatatgaattattaggaaaaattcatttcttcctataggcttttgaaaattttgcttagctttggtggatggcatagaagttagtttatttttggtctttcagaacagtatgtttgcttccaaagtataattgcttctcgatggtcgaaccatcagcattaaaaattctcctttttcctactgcagtacaaaataatccatatgaagagtaatttcttttgtaacattggtcagatttacagactgttttcctctggttaattcattatagaaaacttgttctaatcaattcacaaagcatcacttaccatgcatctcttttctaacatactttcttacaaataatttcctgaaaagtcactctttctctacttttcccttgctctggagtacttcatacattcttttaaaacaagatcagtttggggacttaatgtaagttaagaggggtttgccataaagttaaataaaaatgaaactgtccatttgttgttatttctttcaaatgttattatttacccacatctactcctaggtgttttttcctaatctgtttcttatttctgtctgtcctcctatgttgaagcaacactgatcttcaacaagttatctgcatgttttataaatccagtaaatattccatttattcaatattcaatcattttattaaagaatgtcatgcaaattaagtacagctatgtctaaatatactgccttaatatttttcctaaacattatatttatgcatagggaacacttagaggtattctttcagaagtgacacaggttctttcttgaatatgaaagaacgctgcataatctcagcatgtctggaatactacttggaaatatttttttctgacagaaagaaaccatttgtgtttggagaattttaagttgcacagactcaactgagaaaacatattaaaatttcaaatcagtttttctctctgttcagaaccatatttttatatacaattttacatatgcataactgtattttctcataattttgaaggtataagtaagagcttatttctttattagccggcttacaaaaaattaaattctcatatggtttcttctctctctctccatttttatggtgatgttctgtgctgtactttaaaaacgaattgtaagtggtatcaggaaaacttttaaagacctaagtaatatttttctttgaaaattgcaaattgatatcttttattaacttttgtggtttcattaggtactttgagtttctatttttatttttagcctgagatgagctgaaagactcaagggtgtttatggcatgtgaacatttctttacattttactgagagcaactttgaacctgcaacattgcagagatgaattttctaatagtatgtttgaaagcctttttcccctttatctacaaaattagcatgtgtataattggctaatataatccatgaaaatgttcatttttctttggtgatttttttctgacattgttttgtaagatcaatacggaagctgactaacctagcccctttagacttcagtaaatctagatttagcatttcttctcagtttaaacctcctcccaagatttttacttgtttgttactgtaagatgttcttaattatcctccatagtctttgggataattttatgattggcatataatgagagcatcatttagataataattttctattaagatcatgttactatgttggttatgatttgcactattataacagcattggcattatattcaaaatgtttttattagtagaaatgttcaatgtttggttgtcagaaacctaatatcatataataatttccagctgcttagtttttattaatgtctacgtgttttttttttttttaatcttcttaagaagttcacttatagtaaattttttttttccttgtagttaaggtacctattgaatcagttaaatatttgcttggtcaaatgaatccgatttttaagatgcaaaaaataactcatacaatgattttaaaaaatcttctgattaaaaaaatatgcattttagtaattttaaggtgagaaaaaaagaatttaaatgtttttttttctccgttgaaaaaatgaagcagttttctagactgtttgtatcaaacaaatgtattccttaaaaccttaggaactttattttttatttatttttttttttgggagatggagtttcactcttgttgcccaggctggagtgcaatggcacgatcttggctcaccacaacctctgcctcctgggttcaagtgattctcctgcctcagcctcccgagtagctgggattacaggcatgcaccaccacatccggctgatttttttgtatttttagtagagacggggtttctccatgttggtcaggctagcctcgaactcccgacctcaggtgatccacccgcctcggcctcccagagggttgggattacaggcgtgagccaccacacccggcctaaaccttaggaactttagagtggctccttctctaatcctctgttatgagtcaagactatttcactaggacctcttttcccatgctatcaacacatataaaatttaaacatattaaaagcttatttttaacattagaaatgcatactatctgatgttattagaccaggttggttatgtaaaagaaatataatcaaagatctaaactgtcccatttgaaaaattacaggtggtaacgtagtagtattgattttctttgagttaacagaaagccaagtcccacttccccctcatttacatgtgygattttttggaggctgttagtatgggtggtgagttatcttgactttgcttgagggccttttatgttaatggccatgtttgtagctaaaatgatcatgtatttttaataaaatgccatcttaaaggtcaatattttattaaaaagtgagatcattaaaattacaaatataggtacattataagtttacattgaaattatgtgtttgtgagagccaaagaatataataatttgttattttagaaaggatttttatccattttattagtttggttgtaagtttcgaaactgtaagtacttctttttttcatcgttactacttaggtgagacttctggttctctctcttccttgcccttattcttaacttcttatattatattcttattttttatacttttccatgatttttgcttttgttgcttgctttatgcttgaatttatgtggctattcctaactattgttaatatacaaatttggtctattaccataatcactgaaaaatatagatgattagaacttgcctctgagacataaccaatatgtattttgtgttacgtgctgatataaccacacaactacatctgccaatacggatttcatttgtttgttcatttcatttgttgttggttcatatatttttatgttttctttttaaaattataaatttgaaattatgtaattttatataattatataatctagtaattttgaaacatatataatattacagtaagtttgaaaaatagaacaagtaattgtccacagccctctctacctaacacaaccattgtctttttaaaaaacatattttcttctatatttctgtatccataacagtctttatattactaaaaaaagtaaaactcatagtgtaagtatgatgattgtatcctgtcttttttttcccatttattgtatgaaatgcatttctatggtactatgtagttttataattttaatagtttcaacttcatttctttgagaaggtgttttataagttaattgatcatttccatacttctgcatatcttggttacttccaagttttttaattgttaaaaaatattgctaacatttgaaattatagtataggtagttataatatttatctataatatgaaacttattttaataacaaatgattcttaatttatgtatgtaagcattaaggttaatactgtattggtgaataatgttttacaaatgcaatgtcgagaaatagctttgaaagtgaccaaattgcaactgtccaagttttaaaattttttacttaagagaaattggagtgactggaatacttgcaaaaagtctttattttctagtcatggtcctgcattgtgaaaacaccttaaattacaagcatttgagaataagttttttgtcccctagtggttgggagccaatgacactgccttacatatttttgtatttctaatacaggggagtgttaaaatgtgtttccttatttccttatttggaaaacgtcttctatcaggaaaaaattatgtttttaatccctaagttaaaccgttggtcctttgttaattttttctattaaattatttcatacctaacataatgtaatagaaatgaactaaattcattttttttctattatgcatctatgtatatagggtaatgtctgaaactttcttcttgacttcattttatcatttaatacttgaaccaaagctttggccatctttgttgattacactgaagagtgtacttaaacacatggattgttatacccacctcatagggttgctgtgagaattaaataaattcatcacacataaagtgctttgagtagtgccagtcatctaacatgtgcccgacaaatatcaaccactaccaccacttatactgatattattattattatttgatattattattaaaaagagaatttattgatattattaaaaagagaatgaaaggcgaggtatggtggctcatgcctgtaaacctagtactttgggaggctgaagtggggccaggagtttgaggttagcctgtgcaacctggtgagtctccatctctacaaaatacagtttttgaaaagtaactaggtgtgttggcgtgtgcctgtatgtccagctgcttgggaggctgaggtgggaggatcgctggagcccaggggtttgaggctacactgagccgtgatcgcaccactttacttcagcctggatgacagaatgagactctttctcaaaatagtaaataaataaaaataaaaagagaagctaaatttagaccaagaatcacctttttctgtcatggcataataatgtaccatctggtatttcaatacaatgtatatgtcaacataaagtagtaaaagggttgttcagtatttctgagaccattggttagttatttagaaaaatataaagttacagccacacttcccaggcctgatttcatcatgattacatgtcagtaattccagatggaattaaaaaattaagtgtaaagctgtgcaacccactttttaacacttcagaaaatattggtgaatatttatcagaactaagatggaaaagttatagaaacaatggaaggaatcacaaaggaaagatatttataaattcaaacacgtaaacagtttaaatttctttatgatgacagttaaaaggaaaattgaaaaccttacatctttttaacaaatagaacaaagggctcgtgaccttattgaaagatacctatgtatatgtatttatgaagactctactccaaaagtgatcaaaatttataaaccaacaatttacagaagtaagaaatgcaagtgagtaataaacatgaaaaaaataccctcaactccactaaccgttaaaataacagtgatgtacagttttcacttgtcaaatcactgaagattttaaagaagagattagaagtcctttgatgagagaatggtgaaatgggccactgtacatactgctggtgggaatggatattgatattaatcaatccgagaagcatttggacaggatctgtctagtttctagcaatttgccctaatgaagtcatcagtgacatgggataaagggatgtttattgcagtcttattgaactaagaagcaaataacgagcaactcagatctctccctttacagttaaatttttaactttcaccaaagctataaattaaatgataaatgaacaagtcatcataaattttctactggaaaatattagataagcggtgtctgtgattagggactgacctgcagctgcagtcttaactctgaagtcactttcctattgtaataaactaaacgtgccgttcctttcaaaaacacaaatctctagcagctgtgggtaagctccctggaaaaagcctgtccataaaaatgttgagccaattataaattgcaaaaacatgaaatgtaaggaaaaatattttttatgtaaaactgttcccttactctaaattccttgttaatgtacccctttcccttccgtctttttaaaagccagctcttgctaaaacttttgcactgaaagtgaactgaaatcaaacaggttcacatttatctaaaagaatcctctgtgtactttcagtttaaggtcacattttttggtcttccttttaatacgagaagtaagatctgaaggcaagaaacgattaactccctttttctgacacagaattactctcccttaagcttagacttaactaaggtgtactgacacatcgctcattattttactgaaattggaaaattacagcctctgtactgccttgaaggacatgtgaagtgtgctatcacctctgactacccatgggggacagaatctagaaaaattgccgttaggagtatggggcaggctgaaaaatcatcacaaataaatactctgaatttcataactcttgctgtatcttttgttctggctattttattggttgtctgggctggcaatttttccttcttttcaccctgtctgtgcatgtgtatacatatatatgtctgtacatgtatatatgtttctgatatatatatatatatatatatatatatgcatatgtgtgtatgtatatcagatatgtgtgtatgtaaatatgagcattaatatgtatttgtgaatcaggggagtaagtaaaaagtaagaccaaaggaaaggatactttctttcaatgtaaatatggtaacaaataactatatccctagaaagagaatctatgaagacaaatgaaaaaatagttaatacatactaaacctttctgttgtattttttaaacttatttatttatttatttagagataaggtcttgctctgttgcccaggctggagtgcagtggcggaatgttggctcactgcaacctccacctcctggattcaagtgattctcgtgcctcagcctcccaagtagctgggattataggcatgtgccaccacatctggctatttctgttgtatttaaaatgtcttaatacttaataaggtactttaggcatctacaatatttaacatatttaaatctggctttaattttaacattttatctgttttatactattagtcaatttgaaactaattagtgagcctcttaactccccctcctcaccccgcttttttttatttttgctagacaccatgctatgggactacaagggatacatgttcctgccttcaaggttcttttaagtagttggwggcattgcagcatgaatctgtagctaacatgtaaagcacttaccatatgccacagatgggaccgaaagctttacatgaattatttaatccttaaccaccttgtgaggcagctactactataatctgtattttaaagtagaggaaatgagccttgtggagaagtaagtcagcagagcctaggtactggtccggatcctctgccagcctctgcttggtaacaatcagtgaccagctgctcccatggaacccctgttgcgacctcactgcctttgctcctttgcattgtaaaatatcgttcaaggcactaaagcttcataacctgtgtgaattcctgtgcattaaggcactgaagcttcataacctgtgtgaattgattgctgttgctactgaaaaaccgatgtgaacaagtgcagcgtatggctgccccgcggggagcagactcagatgacctccagagtttcttccagctctaaggctttcttgtttgcagagcgttagcctttgacaccttttagaattttaactcttagaaaatgcctaatgtgtcatgcttkctttgttgaaatttacatgaagcagatgaaacaggaataatagtagggtttttgttgctgccttttaaaattacttccattcagtaaacgtttatcaagcaactgttctgtagsaagccttgcacaactgacatcacccaactatctatgcaacatggtccccatctttgacactcrtgcaacatcaccttaagagatctgattaccttctcttttcctcactaactcttcattgtttatgatgaaagtaaaaacttggctgggtgtggtggctcatgcctgtaatcccagcactttgggaggccaaggcgggtggatctcctgaggtcaggagttcgagaccagcctggccaacatggagaaaccccrtctctactaaaaatacaaaaattagctaggtgtggtggcaggcgtctgtagtcccagctactcaggaggctgaggcatgagaatcgcttgaacctgggaggcagaggctgcagygagctgagattgcaccactgcactccagcctgagccacagaagtgagaccctgtctcaagaaaaaaaaaaaaaaaaaggaaagtaaaaacttaagtgaattttaaaggctcaattaggtaagcacattgaaattcaagatttagctgtgatttgctcatcagaaatttgtcaggtttttacttttggatgttatttcctgtggatgaagcatttatgttcttgttatatccattcctgtgccaaaagtttgtagagacttgacagcaagcctccctccatacagggaataattataaaggaatttatagttctacctgcttattctgtaattgcctctcatgaggcaagagctgtggaaacatgaaattagaatgctgtgaaatatcagcattctaacttttgttgttagagtagctcatgtatcatctttgttctaaaccagaagccgtgctaatactgggctacagtctgggccagcacacatccgtgacagagtaggtgctggggttggtttgggataactaaattctgcaattagaaagagacccttgtctgagaaccactgtgctcaagcacaaggggtagttgtaaagaccttggctacttctggtgtagtgtgttatgtctgtgataggaaggtggctgggttcagtgtctcatgcctataatcccagcacttttggaggctgaggtgggcggatcatttttgctcagggcttcaagaccaacctgggcaacatggcgaaaccttatctcttcaaaaaaaaaaaaaaaaaaaaattgagccaggtgtggtggcacatgcctgtggtcccagctactcagggggctgaggtgggaagatggcttgagcctgggaggcagaggattcagagagccgagatcctgccactgcactccagcctgggcaacagagccagtccctgtctcaaaaaaaaaaaaaggtcccttttctgggttctatgaagctttccctacaacctagaaaacaagatgaacaaaaagtaataaataactttttctctggcgctttacatagaagtttgaatcctctctgcatgtgtgattttataattccacctctttttctcatcctagggccagagggatgtatttaccttctagctttcctcagatgtcatctcttgtcttataagacacccatgtgtttacaacttgtcctattctcttctcctctttacctttgtaaaggagctttagaayractgtcttccttgttttagatcctttataaataaccttttctctcaactcaaatatcttctcaaaatcggagtgactcttagagggccacagaaacatgttatcagataaactttagtcactctgtccttaatatcttgatcaatttttatcaaactctgaatccataaggtgagtcacataaaaccattgttagtcattggtaattgtttcacatttcctttattttgaatcctgttaatttcttaaacccartggtaacaattattcatttccttcatgcagtcatcctatgatatccatgggagattggttccaagacccccttggataccaaaatctgcagatgctcaagccccgatataaaatgtgtacttgcatgtaatctatgcacatcctcctgtatactttaaatcatctccagattacttgtaatacctaatacaatgtaaatgctatgtaaattattatactctattgtttagggaataatgacaaggacaaaagtctcaatacagatgaaataacactcaatacatgttcaatagagatacagytaaaaaatttcagtccataattggttaaatccacatggatggaacccacagattcagacagctgactatattcactaaaatccacacagattagttattacatttttttcattttgttacaaaatacctctgtttataaaaaagatatctatggctggtcatggtggctcacgcctgtaatcccagcactttgggaggctgagaagggcggattacctgaggtcagaagtttgagatgagcctggccaatgtggtgaaaccccgtctctactaaaaatacaaaagttagccgggcgtgatggcatgcgcctgtaatcccagctactcgggaagctgaggcaggggaatcacttcaacccaggaggcggaggttgcaatgagccgagatcatgccattgcactctagcctggacaacaagagcaaaactccatctcaaaaaaaaaaaaaaaaagttatctgtttatcaaagttgatgaatattctttttgaagagaatgtatttttatacctttaaaatgtacttgcattttattttgaactttgcagctgatataaaatatatataagggtttttttgttttgttttgtttttgaaatggagtcttactctgtcacctaggctagagtacggtggtgcgatcttggctcactgcaacctctgtctcctgagttcaagcgattctcctgtctcagcctcccgagtagctgagattacatgtgtgcaccaccacttagctaatttttttgtatttttagtagagatggggtttctccatgttgccccacctggtcttaaactcctgggctcaagcgatctgccctccttccttggcttcccaaagtgctgggattataggcatgagccaccgtggctggctctatttcttaatttcayatgtgtcacattatgaaagcatagaatttccattagagaaaagaacctgaggcttgatgatttattccatcccctggagtccagttaaagttaactgacttgctgaagatcaactaattgttgactgggtgagctttgttctgtcagcctgactgacgcataagcacaygctacactacacactccctaatttagttttctttttgtttaacaatagatgctgcctgtgccrtgggtacgttgtgaggttatgcttaggatgtaatagaaactttgttcatgttcatgaatgagagaacttattgtttacatttaaaatgcttttacagtgtttttaactttttcatatcaaatgtgtttaccaatcagttcttgataaattatgatttttgacttattttgctttattatagttattttactcaatgatttttcaacagagctctttattgtttaaaccaaataaaatttacattattataactacataaataaatattaaatctaagttattgtttttataaaattgtgtactattatttttttcttactgaatgcatttctaacaatattatgatgaataggccaggcacagtggctcatgcctgtaatcccaacactttgggaagctaaastggggggattgcttgaggccagcagttcaaaccagcctgggcaacgtagcaagaccctgtctctacaaagtattttaaaaattaaccagccgtggtgatgtgtgcctgtaatcccacctgcctgggagcctgaggtgggaggatcgcttgagcccaggagttcaacactgcagtaagctgtgatggcgccactgctctccaggttgggcaacagagtgagaccctgtctctaaaacattagggttttaactttaaaaacccaatattatggtaaataaaatccaacccaactctgagggttttttttttttgaggktttcttttttggttgatgttactaaaaatatatttattttaatatttgcagctggttttagaaraagttttcgtcttagtagaaaagataagaaaacaaataaatccatgtatgaatgcaagaagagtgatcagtacgacacagctgacgtacccacatacgaagaagtgacaccgtatcggcgacaaactaatgaaaaatacagactygttgtcttggttggtaagtgcttgtttctgtgagtaattctgaggaaatgagtgagctagtaagaatttctcttcaaagtgaatcatacttgawgttttcaagctaaaaatctcctccccttcaacaccttttgtcttgtctctgaaacaaaatctttagttttttgtacgtaattgacttgcagagacttttaagacatttctgaagaacggtactgtcgttttagtggaacctttgtcaagtggggatagcaaacactgttgtaatatatgaagcatacatcagggcaattaaataatagaagtgaatatttttgaacacaatgcaagttcgtttcaaagcattttgaggcagcagcatggtacaagcttcagatggcatttagaccttcagtgaaataaagtattacagcagagttctaggatatttcaagctagagagtcagcaaagtcgctttaaagttgataattggctgggtgcmgtggctcacacctttaatcccagcactttgggaggccagggtgggaggatcacttgaggtcaggagtttgagaccagcctggccatcatggtgaagccccatctctacagtgaagccccatctctacattgaagccccatctctacaaaaatacaaaaattagccaggcgtggtrgcacagtcctgtagtccgagctastcaggaggctgaggcagaagaatcccttgaacctgggaggtggaggttgcagtgagccaagatcgcrccactgcactccagcctgggtgacagagcgagactctgtctcaaaataaaaaggcagttaataaaggaatgtgggtattttcacaaacatcgattgccttgactcagatttgcatcctagcatctatctygygcacccttcacagatgtgagtagccacaagctccatgtatcttcacttcatcctcaatgcatttctttaaaaatgtagcgagagatatttaaacttccaggatcaaagccaatgattttagaaaagttttggagtagaagagcatggtgtctcttagtgttagtacattctcacactgctataattacctgagactgggtaatttatgaagaaaagaggtttaattgactcacagttccacaggctatataggaagcatgactgggagccctcaggaaacttaacaagcatggcagaaggtgaaggggaaacaggagcgggcttcacatggcagcaggggagagagagagtgagagcgacaggggacgtgccacatacttttaaaccatcagatctcctgagaactcattatcgtgggaatatcatgggagaaatctacctctgtgatctagctacctcccaccaggtccctcccccagcattgagaattacagttcaacatgagacttgggtggggacacagagccaaaccatatcactcttgttaattgttcttttataaactcgtgatgatacttatggaaatgagaatcamtggagaacctgagaattaccccatcttagtaagatggagtcctttgaaaggttacaacccatgctgttcattgagaaatggtgggtgactcatgggaaatgatgcaatttctcacatctgtaggtcctggaagtgaacactagcatcattacatattaagattgtttgcattattttgaaacacatattcacatacttcaaaagaaattcaaaatttcctttattaataatgtccacatctcctaattcatttatactgagcctcctcaaggaggaggaggaagaatttatttatagcttacagtgccctgcttctcatccttatagaggtgtgctgagagaacatgcatttcccagctcaatggggctacctgagacctcctgctcctctcccacctcactgtcccttctgtgctgcctccttcaccagcacagatcacagcaacatctcttctgtccctgttgcctcttctcctcagccaaggggaaagacatgtaataaaatggcattgaggctgggcgcagtggctcatgcctgtaatcccagcgctttgggaggctaagccaggaggatcacttgaggtcaggagttcaagaccagcctgcccaacatggcaagaccctgtctctactaatagtataaaaattagtcaggtgtagtggcaggcgcctgtagtcccagcttcttgggaagctgaggcacaagaattgcttgaacctgggaggcagaggttgcagtgagctgagattgcatcacggtactccagccggggcaacagagcaagattctctaattaaaaaaagaaagaaagaaaaaaaaaggcatgtgttagtctgttgtgtgttgctgtaaaggaatacctgagattgggtaattcataaagaaaaatgatttgtttggctgatggttctaatagctggaagtttgggcatctggcgagggcctcatgctgctttgacttgtggaaggcgaagggaatcctgtgtgtgcagagatcacgtggagagagaggaagcaggagtggtgggatgtcaggctgtttttaacaaccagctttcttgggggacaaatagagtgaaaactcactcactgcctcacgccagggagggcattaatctattcatgagggatctgctcttatgacccaaacacctctccttgggccccacttccaatgctgggatcaaatttcaacacgcaatttggggggacaaacatcgagactatagctagagggaaaaataaaatgggaaacttcattatcttggaggccacctctccagatttgactccatctacactctgcctggttttgtttgcctttcagagtccctaggttgttgccttttgtgcgctgtccagaggtttgggctgtattcagcgggggatagactctggtgggctttccccgatatagtggatctggaactctctgaagctttaaactcctctgacacaacttggcctttcttcatgggtgtgccttaatcagcctcctcaaaactgtgtaatggaaccccagccctactggtcagcagttgaaacggtcgtcaggacaaaagaatatcacagcatcattccagctaccttttgaggcaaaataatgctcccagaattatatatcaccacattctattgtcagccaaaaatcatagaatgacctgaggtattttcgcttctcctgtctgaatgctaattgtcctgatccgtgatcactgattgcactaaaattcatctggctgaaatcatcagtaaagagattaattgtatgcacttcagttgccctgtttcccctttggcctttgggttcctggtacccgaattctgaattgaatgtggactctgttttggggccaagtgctttgctttttttctttcattgttttctcttctttctttctttactttcctttaaattctgggatacatgtacagaatatgcaggtttgttacataggtatacatgtgccatatggtggtttgctgcacccatcaacccgtcatctaggttttaagccctgcatgtattaggtatttgtcctaatgctctccctccccttgcccccaccccgcaggccctgatgtgtgatgttcccctctctgtgtccatgtgttctcattgttcaacttccacttataagtgagaacatgcggtgtttggttttctgttcctgtgttagtttgctgagaatgatggtttccaacttcatccatgtctctgcaaaggacatgaactcatccttttttatggctgcatagtattccatggtgtatatgtgccacattgtctttatccagtgtattattgatgggtatttgggttggtcccctcccttttctcactttattttttaattcccagcagaatcctaaagccttttttttctagccctgtgatatcaatcctattgcaatgactgctgtttctgtctcctgtttgaaattccttaagtttgattcctgattctcagagatttcccctttgtcttccaacagggatattccctcgacatagtcctaaactggagatgctaaatactgatgctcccaagtggcacagtcagtgaacgtttatattgcctttgataggtgcttctgccaatgagtgtttcctcattctctatagatttccaggccttaagtaaataattaattgcattgcttcaatgacaaccaaaatatctgtttgaacttcttaggtttctctgctactaagatctaactgtcatgtttcactaccctctgctgttcccaactcctttcaaacagtctcaagcaagtttttaaattttaacttgtttttaagagggtcctgtccttcctccatgctatataataacagtaactaagagctatgagtgtattccttcagtcctcatcatgactacatggtaaatactcttattattccctgttttacagatgaagaaactgaagcacagagagaagtaggtaacttgtctaagatcctgaagcattaagttacagaaccgattcagaccccagcaggtggacaccagaaccctacttcttatcttactgtagaatatggcttccaatcttaaaattagggcagtacttgacactgtgctggatctaaatatcttactttttaaaaaatctccttgattaaaggactgttcattcattttcctgacagatacctccttgctttgtgaaagtttagatgtgagtctagtgaaagcgtttatgttcacttgaatcctgcccacgtctacaacttgagtttccaatgtaggtctccctaggtcagttcaataggcttggtgggctcacctctctctttcctacacgctaattctgcacactgtctaggcagggtttcttactgcacctgtcattactatttcactgccctgctccttaaaatttttcaataaattcctaaagtgctgattttcctggtctttccctctcaaatttgttcacatttcccatggtcaacctgggataagtcttccacttaccacgraaggttatattcataatctgtctactgccttcagagttcagagattgtctctcaatagttttttgattgccatagatagaggtagtcttggagaatatacagagggaggagctcctgcccttctcctctgacctccagaccctattccagggcttgtcagatttaacatgcattctggtcacctggaggtcttgttaagatgcagtttctaatctggtagcctgaggtggggtcagagagcctgcatttctaacaagctcccagatgatgctgttgctgctggcctgattaattagggtacattttgcttttcccctattgctgctggttcagatgcagatgctgtgaggtctggtgctgtgcacacagggagaagccttgttgctctgtttgaatgggttcagttgccattgccttctttggttagtgattgtgaattggctgccatttattttgattttctacttttcttggcattgtatttcagttttgtgctttctcatgtatgccttataatgatggcttagaaacttttggtttcctcttaatctttctgctgttcaggatttgctcagcaatatttcaggttttggcttgtctgttttgatcaacagatttgttatgattattagcctttagtctgaaattcctctaggaaaattaactttatgtgaaactctttagcccctaacacgttcttttcctattttggagcaattgctggtataaggcagtatttcttaaatctgtgacaattggattataacagaacagacttaatggagaatattcattttattctttttgtcatgttagatcacattttctcttcaggcraattgtatttcctgtgtctctatataaaaaatagagtaaaggccaggtgcggtggctgatgcctgtaatcccagcactctgggaggccgaggcaggcagatcacttgaggtcaggagttcgagaccagcctggccaacatggtgaaaccctgtctctactaaaaatacaaaaattagccaggtgtggtgtcgggcgcctgtaatcccagctactcgggaggctgaggcaggagactcacttgaacccaggaggcagaggttgcggtgagctgagatcatgccagtgcacttcagcttggggaacaagagcgaagctccatctcaaaaaaaaaaaaaaaaaaaaagaggaagaaaatcatgtaagcatggtatattaatgcaaacttcttagtaatagttctactaaagaaaagatctagaaactttccagaatcaaraatgcctgtacagctggaggcttggaaatttcagccccctggtgtcattaacagaacattccacctctaccccactgtggcctgtgtacagcacgacactgtacagtgggatctggtgatggccaaggcggttttatgtaactgtccttcagaagtattccctattatttgctttcttctttgtattccttactcagaaaccctttcagcttatgtgtatggcacattggaagtatcagaagcttagagcctgttacgtggagaaatccccatctctttatatcctgtgaggcaggataatatagaagatgagagatgagcctctgggacaagatggctgccttccagtcctgtgatgcccttcagtagtcacatgacacgggaacaattcaaattttctctgggcttcagttattcatctgaaaatttgagataataaaaacacctactttctaggtttgttttgagggttaaacaaaataatctgtgcaaagatgcaggccaattcatgcacctagtatggttttaataagaaatatttattgcccagcatagtggtgcatgcctgtggtctcagctgttcgggagactgaggcagaaggatcacttgagcccaggagctcaagaccagctagatacagtgaaacctcgtctctaaaaataaaaaaagagactgagcgcagtgactcacacctgaattcccagcgctgagggaggctgaggcagggagagtgctggaggccaggagttcaagcccagtctgggcaacatagtgagactccatctttataaaaaacaaaacaaaataaaataaaattagccaggcaaggtggtgtgtgcctgtagtcccagctacttgggaagctgagatgagaggattgcatgagtcagtgaattagagattacagagagctgtggttataccactgcacattctgggctgggcaacagagtctaaaagaagaaggaggaggaggaggaaggataaggaaggaggaggaaggaggagaaggagagaaggaggaggaggagaaggagaagaaggggaagaagaaggaagaggaggaggaggacttacatattaactaaacataataagataaacatgaaatgttcaaatatcagtaggcttctactggttttgaacctcagtgttaaaacacttattagattatctagaagtttatcatctgaaataggtaatgaagccatggacacaaattttggaaattctgggttattcctgaattaactgtttactgtttagtttatgattatagaaacgttgtatacataggaatttatttccttggctcctacaatgtgtatttatgtaggaagatggaaaaagtataagtgtcatagtcctccttggaaataatttctggctgggtgcagtggctcatgcctgtaatcccagcactttttgggaggctgaggcaggtggatcacctgaggtcaggaattcaagaccagcctggccaacatggtgaaacccgtctctactaaaaatacaaaaattagccagatgtgttggcagtcacctgtagtcccaggtatttaggagtctgaggcaggagaatcacttgaacctgggagttggaggttgcactgagccgagactgtgccactgagtgacagagcaagactctgtctcaaaaaaaaaaaaaagagaataattttttgcccagtgtttccaaagccattgggaaaagtgacacttgctttgaaaccgtttcataaatattgttgagaaaatacaaaatattatttttctatattatcataatgctatatggtttttattcttatatttaatgatcaagaaataataatagaccaagttgttaccatggcaaaaatacaataatggaggactttgagctgtgatcagaagtattataattttctcttcattttgaaaatgtattcttcttaagcctcattttagccaccaaaacatctcaatgacagtttctgttaaatttccttctgcatttaaaagcattttctagaaagtatgttgaaaccaaatgtcaggcttttaatacattttcctacatgacaagtcttatcttcagtgaaacccaactttttgaaaagtaaagtaataaagtcaaataatgtgtgtgtgggtgagggagggagcagggagaagacttaggtgttaaaaagcaactaaaacacttttcacgtttaagccaaaacaagagcaaaaattcatcttgtggatattcagacaatttgcgacttgttctgtctggctgggaggtacaagagaaactaataataaatctttctgtatatttcacatttttagcttgagcatcagtactattctgctctcctttgtgctgaatcttatrtgctgcccaaagactgcttgcagaggtaatttgaataaacaggcatttattataagactgtcactattttttcataaaactgtggcataacacaaagcctcccacataaagcagagtgcaaagtaagtgctcaaaactaaatgtgttagtgtgtttattagaattctcatatcttttgttgcactttgatggaaggcttgtagaattagagttggctctggaggattttatatagataactgtaaaactgaaagtcataatgaaattcctgagaatgtgatggatttaaaattataacccttgtatgtaaaaggtaaatgtgatcttcactggagtcacagttggctttttatgccgttggccaatcttaaatatttattttcagacttcatttctgggcataaaccacaaatctgttcattcaactgagttttacggtgtaccagctatgccaggcactgttctgagcacacaaacatttttgcccttgtgccatttatgttctaatgggagaagatggaccaaaaccatatttataataaattagtaagaaatgataaaatcacttgtacagttgttagaaggcgataagtctatggaagaaagtaaagtggaatgggataaggggaatggagagttggggacacagacaggatagattttgaattgggagcttggtggccccattctgagcaaactctgaagtaaggcagtttctcatgcccccgtctacttagccacggaacactcagggatgattttattttgacctcttaattttattgcactcttgtcatagttttgaagtagagtgagatgagtattttagtcagtctatataagcgtagagtaaatagctgcctggaaaaaatggtgctctttcaataagcttcccactttttacttttcttttgttttccttccttccttcttttcttttctcttctttcttttctttttctttcctttcctttccttttcccctcccctctccctccctccccctccccctcccaatcttggctcactgcaacctctgccttctgggtttgagccattcttccgctgggattataggcaccccgcaccacacctggctaatttttaaatttttagtagagatggagtttcaccatgttggccaggctggtctggaactcctgacctcaggtgatgcgcccgcctcggccttcctaagtgataggattatgcccatccatatgcttattctttatgactgtcatttaaaatatacacatgtgccacatttcattgatttcagtaattattttcacaatagtaatacatattgctgttcaagtaaatgtttattcattcgctcagaatgtgcactaacatgtaaataagtacagaattgaaggttcaaaacacaacgcctgagaccatggccattaacaggttttttgtttttttgtcagtataagaacattatacctggtatttcaaatcattctttcagtgcatgtatggttttgggtgcgcttctaggcgctgatgttattgcctgaaatctttttctactcatttagctttgttttattttttgtttgtttttgttttgttttttagagaggatcttgctatgttgcccaggctggactcaaactcctggtctcaggtgatcttcctgtctcagcctcccaagtaactgggattacaggtgcaaactgctgcacctggcttgtttctttctttttttttttgtggtatatgtctgtatcagatttaaaaaagtagattatttggggagaccatgtttacagaatgaaaaacttgtatgcatcaactgtgaattaattttgaaagtatactgtgctagcattctaatcaaaatatactttttgttttttatacataaacatttgttacaaatcataaacacctaaacatatttggggaatacaaagaaaatctgaaacagaacaatgaaaataccctacgtctcataattacattacatgaaatgaggcaataatgtcaaccaatttcaagatcatttggggaaaaggtgtcatgtatgtctaccttcttctatgtaaattaaagctgagaatttgctatagatttttaacctttttaagataaacataaaagaatctttgcatgtagttaacagtgactgttttcttaaatttaaaatcttaaatagmaattgtattaacattttatcgacaccttaaatgggctacgtaactttggttaaaatgaatgaaactttttataaaaccatgcaacacatttgcttactttcaataaggagttactaattaaatgcataaaaaggaatttaaagtagtattatgcttttctaattatcttaattatccaattgacacacatttttcccaagaccttcacgtaatacaaattgatacacacagctttattcttcctttccaacatggttttataaattcttatgaaatattttttagatgaagcagataaatacttacttacatttctggtttggctataaacattcttttcaaagctaagagacacaccaactttagtttactgcctgaattccagattaataagctccaaaatcatttttaatgtgcctttttggcttttacttacatatatcatctttgtgtttgattttcctcagtcctgaattgagaatccaacacatatgcccagtgtctgtggcccaggcctggtctgcacatcatcctcattcagtttatattagacttctcagagattctgcacagagtgagctttgagatcaccagatttgacttctgccactttttgtagcctgaatctctgcctattcctggagcataattagtcatcacgaagtatggattgcgtggactggggatgagagagtccgtgaagttccaattcacagccataaacagacagcagagcaacagctacccgagttcatgttttattggcatattcttttcataagatcataggtagagtggaaagaatgcagacttttgagttagacagacaggcttttgagcaccagctaagccacatgccagatgtgtgacctttgggaaattacctcacctttcattgtctcagtgttctcatctgtaaaatgaggataatgatacctttcttgcagggatgttctgaggatgagtaacagtgtatgtgaaccatgtcacacatgcctgtcatgtaaaaagaactcactatgtcatcatcataattatgccacagcctgttgtctatgatttaaagatgggctgtttagattctgttctcttcttcgctttatcattagcaagctcagctgaaaacgaactacagagtaatctacttatatgtgcccgtgtaagtgtatttcaccaattgtgataaaaatttctttatcgaaggggtaaatgaagctatcctattgcagaggcgtatgaataaacctaactcagtttgcatccctaaattgcttggaatgtaaatagattttgtattccaaatacaaaccagacaactaaaaatgttgtgaacttaggcctaaccctagaaagaggatacgggacaggatggtgcatctgagctgtggtcttttaaagtcaaggggagactctagaacttctccagtggggatggcagattgatccaagggcctgactgggaaaatgctgtttgtaggcccactggacaatttggcagtaagaatgattgaaattatgtctctatttttaacctttcttgggaggatacttctacctttgaagatgatgacctagaataacctaatttagggaaaattttccaaataaagtcatttgcctctgaatgttcttggcaccctacatgggtgtcgtgagcttgcttgtaagggttagattataaagttagcatattacctaggcccaaaatcgaatatagtcaaaatttaaggatatcacattagagatggcatattttttcccactaattcaaatatacctagtttttttttccctagagagttgattttttttttttttttgtagttagagatttttaagaataagaaaggaagtgctagacctatctcacttggcaaagtatctcacactctagcagtcactccggagctgagaccttctaaggaaatggtgaatttacatcccttcctgtagttctagttgtcttgagggacaaggcaggctgggacactctatttgcatttttttttttttttcagacggagtcttactctgtcacccaggctagatcgcaatggcgccatctcagctcagtgtaacctctgcctcccacgttcaagcaattctcctgcctcagcctcccaagtagctgggattacaggtgtgtgccaccatgcccagctaatttttgtatttttagtagagatggggttttaccatattgaccaggctggtctcaaactcctgacctcaggtgatccgcctgtcttggcctcccaaagtgctgggattacaggcgtgagccactgggcctggcctggcctctatttggattttataatagtgttttgctgtgtttgcttctgtgtgtgtgtgtgtgtgcgcgcatgtgtgtgggaacatatataattgggtttgcgttatttgtacttagaaggtaccttcattgcaacaccacttgttttccttgtattttctctatttatttgaaaaagtgagttttagaacttactctgaatactttttgaacctttaaagtaggtaaatatgtaagcccctacatggtgcctgacatattatagacaaccaataagcacttatgtctttcgccctttccctcagaagtctcacctgtcaatgcagtctcaggttttaccttgatgtgaatacattcacaatggaaccctagccctgtcctctctgttacatggcagctcttgtctgagttttgggagcaagattttctttctgtaaactcactgtacctagagtgaatccatcacctccccttttatcttaagataaagagccaagttcagatgtgaattccagcaacttctattggttaacttgagcagattatctaattttcatatccacacgttctaggggcaaatactttttaactttctctcacactcctttggttcattcaacaaagtttcacctgcataatagcatcattattgagtataatttaaataaataatctaactagggccttcaatttgccagctagggaagccgttgttgaataaggcagaaggcattcctgttttcacagaactcacggtctgttagacaatcaagacaaggaagcaggcaagtacaatgcagtgtgataattccttggaagtggaagtacaggaaacacatgaactcgggaacctaacccaaatgtaaagtgtcagagaatatttccttaaggtgcatctgagctgaatcttaaacaacaagcgagaattagtcaggtgagaagacaggagtgtgcataaaagagcaagtagcacgtgatgaagacccaacacaaggagaagtggccacgtttcaggaagcaggagaaatttcatggcgctgcagcgtacagtgcaaggaaggagtggcaagaattaagaggagagatcatagtaacttgcgtcgtgcaatctatataaacctgtaaaaaaatttacacttgactgtggacacaggataagacaagtgggaggtgctggtgagaagtttcggggccataaaccaggatggtggagagaagggtgaactactgtgtgggttttctgcactctgtggttcaggtgtgggtatggagaggggccaatgggttgatcttagatgggatgtttccttggcacgtgatagggtttggatctgtgtccccacccaaatttcatgttgaaatgtaatccccagtgtcggaggtggggcctggtgggaagcgattagattatgggggcagattttccccttggtactgtgtcgtgatagtgagttctcacaagatctgtttgtttaaatgtgtgtggcactcccctcttccccttcttcctgctcccgccatatgagacacctcactcccccttcaccttcccccatgactgtaagtttcctaaggcctcctcagaagccaagcagaggatagaatcatgcttcacaggcagcctgcggaactgtgggccaattaaacctcttttccttataaataacccagtctcaggtattctttatagcagtgtgagaacagactaatgtgtgataaaaggacagtgtgtaaaagagttgaagatattagcaagagtggaagacaccatggcccgtgaaagtggaaacatgaagggctgttgaattaagggctggagaagaatttagagttaagggaaatgtggagcttttattgttgttcttgttgtattaaggtaagagaggctttatcagttttaagtgctgatagaaaggagctagaagcaagagaagtgaagattcagggagagcaatctctaagagaagatgtgagagtatatggctggaaggaaggataaaggctgctttagaatgggcattgtggttcatgcctgtaatcccagcgctttgggaagccaaggtgggtggatcacttgaggccaggagtttgagaccagctggccaacattgcgaaaccctgcctctactaaaattacaaaaattagccaggtatggtggtgcacacctgtaatcccagctactcaagagcctgaggcatgagaattgcttgaacccaggaagcggaggttgcagtgagccatgatcacgccattgtactccagcctgggaagcagagtgagactgtctcaaaaataaaaataagcaagttaaaaaaaaaaaaggttgctctaggtggatctagatgcatcactttgtaggaaggactttgaaaacatttccatgtgttggcctctatgttttctgaagtagttgaggtcttctgctgagcatgaggtggtgataacaacactaaatgttttatttgttcattcagcagatgtttattaaggatttatttggtggggatggtaaacaatataatactcctgccctcatggtgcctctatctggtgggtgatacagccattaaacagtgttttggctagttgtctgattatgatttttaagtattatgaaggagatgtacaggatgctgtggaacatgaaagtgggaaccctgatcctctaggatcaggggtggctttctggaggaagcactgtttgagccaagctctgaaggatagatcagaattcctctcagcttcaagtaaaggagagagttgcaggcagacagggcagggttcagatcacacagacccttgtagactaggtaaaaaaaaaatattttttttttcttgagatgcagtctcactctgtcaccaggctggagtgcagtgatgcaatcttggcccactgcaacctccacctctcagattcaagcgattctcttgcctcagcctcccaagtagctgggactacaggaacccgccaccatgcccagctaattttcgtatttttaatagagacagggttttgacatgttggccaggctggtctcgaactcctgatatcaaatgatccacctgccttggcctcccaaagtgctgggattacaggtgtgaggcactcccctcagctccatgtaaagattttaatcttttttgggagacccactggaaactacatatccaagaatgtcaagcatggttgcaacaggaccagaataactcctgaaaagacctttctggctgccaggtgatgctagataatatggaaggacagcagatgtaaggcagataaaaggctgtttcgggacaggaggcaaaacaggggtattgtggcagcagtggcaatggggaagcatagatctgatagatctgaagaatgtttaggaggtgaaattggcagcctttggtggttgattctagggatatacaagagagaagtgaccaggaggctcccaggtgtgggtagagaggagcctggagaaaagtcgaaattgccatcatggggatctaagaaatccagatgataaggaaaacataaaatggttgctggagcacatgaaggtcctggtttatgcgtggagaccaggaatgcgtgatgttactgctgtccaggggctgcatgggttttctgcactcagctcagcagtgggtatggagagaggccattgggttggtcttagatgggtggtttcattggcaagtgtgataaaggacaagtgtaagagagatgaagacattaacaaaatcatagaagtgaaatgtccttatatgaccataggtgtgggaagaataactgagtgagtgatccaagaagatcagagaatgataccatactggggaatttggatttaatattttcatagtgaatcagctcctagtgatggcaaaggccaggcgtgccatgtcatggttgaagtgaagtagagagggaggtcaccagagatcaggaagtcagaggctgcatttggaagcaatttctacatggatattgatgtcacccaagatgatggcaggatttggggtgcagagaatgacaagggtcaggtactaaagtcatagagagtggtttccacaggggcaggactgcccactggggtgcattatggacattgttagggaactttttttgatgtcaaaatggctgatgggtagagggatgtagacttgacccttctatagaacaaagatctgactgcatcccacattacttcaacatgctgtgctagactttcaaggactgaggagatgatgcagcctgtggtggggtttctagaaaagcaaactgtctggtgcactgaagcactgtctcatcccacatactattctttattttattttatttttgagacagagtctcgctctgtcgcccaagctggagtgcagtggtgcaatcttggcttactgcaacctccgcctccctggttcaagcaattctcctgcctcagcctcccgagtagctgggactacaggtgcctgccaccatgcctggctaatttttgtatttttagtagagacaaggtttgaccatgttggccaggttggtctcaaactcctgacctcaagtgatctacctacctcggcctcccaaagtgttgggattatatgtgtgagccaccgcgccaggccccatatactactcttgggtaagctcaggtcatttgtattgttttcttcacttcgatagccttgacatgctatccttagttgtttccttctttccttatcatattcaaggaagtctgatctgtggtttctatccaaatgctagttcttattcctggatttacatgtaccactgggcttttgttttcctgttctttcttgtgcagaatagctcctgatcttttaaatccaaacttatttattataagtaggtgcaaacatctgacttggttaggttttctgctctagtcatgccaagaatttacatattgaaatacatattgctttattataaattattttttctcctttcatatattatttttagttaggtcaatgtattaatttggaagggagaattatgtcgataagttatattagcaattaattccatttcaggatataaatggggtattatggcatatttattataagagggagaattgagagttgctgtcttacagaaaagggaaagttgccagagaattgatactggacagcagtgtggagaaaggttgaaggtggtagtgaatgaccacctcgggacaggtgtttttatacaagggtcagggacctagaaatggcattagagcaagaacagcacagtccccaacttcccccactttgtctttgctcatccttttccctccacctgggatgcccaccctacttctctttacacctgcatgttctccattgtatggtgtaaaaccttattctttcaaagcctcctgtgacctcctcagggtggaagaagacataggcaaggcagtgaacagtcaagtacctggacactgtgctagccactgtgcatgcgttctcagttctcattcattctgcccaagaaggaaarggaacaggcacacttttagaaataaaatgaaatctaattacgcccctggctttgccttccagtgtcaccaggtgagggcatagcagatgggaagagatgggactctacctgagggcagtgtggtagcttgtgtcacccgctgaaccacaccatccttaaatggaccctgatggcagcattgtgagaagcttttaggtggaaagcaatgctggaaaggggggacttatgcctgtctaacttttgatttcagactcatatttgaaactgctctttgttttttgtttttctggtcccggactcataattaaccggtgacttyctttaagatcagagtcaatttgtcatcttttgttgtccgcagaatctactgtatgccttgctccttatatatgtccagtgtgtatacattgattgagtaaagtgtgtaaggtctaggcaagttttcaaatgcttaaggaagtctatagtacaggaaaaggtctcagcacatgtaaatgtggctgattgtttagcagatgtaaaatgcgtaactgaatttgcatcccaaataaagtcagggtgaaaggttttgttttattaacacttaaaaacatttaaaattgacattttcactatctgcattatgcaattgaattttcttaggtagacatgtttttaggctcttgtgggtagcttgttatttggtaatacttaaatactctttttttgaggagtctcactctgtcacccaggctggagtgcagaggcgcgatctcggctcactgcaagctccgcctcccgggttcacaccattctcctgcctcagcctcctgagtagctgggactacaggcacccgccaccatgcctggctaattttttttgtattttcagtagaggtggggtttcaccgtgttagccaggatggtctcaatctcctgacctcgtgatctgcccacctcggcctcccaaagtgctggaattacaggcatgagccaccacatccagcctaaatactctagaacatatctcatttaaacataaatctttctatcctttttgaggaaaaggtgaggatttcaattgaaaaagtaaaaaagcaacaaaagaaatctagcattttcttaagttcaagttaacagaaaataatctctttacttaggatgcaaagctggatccatgttttcagtctgtcttagagactcatgtcagttacagaaatgtttatgtggtgttttgtccaataatgaatttctgttaccctgtttttcaggtcccgtgggagtagggctgaatgaactgaaacgaaagctgctgatcagtgacacccagcactatggcgtgacagtgccccgtgagttctgcgctactcagtgttcctatgactacacttacgataattttaaatttttaaaaaattattttaaaaaatttttaacttgtttttaaaattttttgggtacatggtaggtatatgtatttatggggcatgtgagtttttttttkktttgttttgtttttttgagatggagtctcactctgttgccaggctggagtgcagtggcgcaatctcagctcactgcaacctctgcctcttgggttcaagcaattcttctgccacagcctcccaagtagctgggagtacaggcacgtgccaccacacccagcttattttttgtacttttagtagagacagggtttcactatgttggccaggatggtcttgatctcttgaccttgtgatccacctgcctcggcctcccaaagtgctgggattacaggcgtgaaccatcacacctggccaaggtgttttgatacaggcatgaaatgctgaaataagcacatcatggagaatgtggtatccattccctcaagcatttatcctttaagttacaaacaattcaattacactcattattttaaaatatacaattaagttgttattgactatagtgaccctgttgtgctatcaaatagatcttcttcattctttgtaactattttctttttgtactcgttaataatgattgcttagtacttaccaagcacgtatggtatcaagcactgttctgagcactcactcatctagacctcccagctgccccaagaagtatatagtgacattatccccatgttacagaggaggaaaccaaggcaaaaatggttaarggatttgcgctaaattacacagatttttggcagaatatttgttaatcacagcttccctactcttaggtttttatgatgaattttagtacacatatgacatcaaattattacttacaaattttcttctaaataaaagtctaacaattctgtttcctaaaataagtgctaatgttttccagagtttttcaccagctttaagattagaagaatcaaatcacagagagctgaaggagacttaattataatataaacctttcttaattactttttatatgtagtaattggcagatgatgttaaatgggcttttcatggctatatagtttaaatatggtaagcttcttttcagtacacagaattagatttatttttataaaagtggttttcataggcattcttacaaataaaatgtgatgcttgaaacattttgatctgcagaataaaggccatttgactacttaatatgttgatawtagaaagctgtctaaaaggctaaattgaaatgttggcttttttcaagcrgttttagtactgttttaaaaaatttacttgtatattgcccttagcgatgttctctagttttggaagagttcaactttattttaaaattatagttttctgtgacctcaagttccttctttttacatttttctaaattattgcttgtawtcattttcagtcacaagttataggactgctgctttctaccaacagagatgaaagttaatgaaaatgtggaactagacattttttttgcctgtaattattcacctcaattacaaaagctgaattgcaatatataagttattagaaaattttacaaaataatttttaagcttacaggtgagcaattatagaagagacctagaagatgcaaaaacagattacaaagaaaaaaaaacgaatttttaaacttcctactgtgtattcatctcctttgtttgtcttaatttttgtagccttcccagtcragtataagatggttgatattatctctatttcacagagaaggagatagggatagaaaggatatgttgacttgagttccatagatgataggtgcacttggattcgaaaccaagttttttttgataccagttctcatgttcttcctcctatattaacactagcaatcctttaaaactacagactatctttgttgtattccagtaagtagtcaaaactgacttcttttgaagatgagaaatatccataagccaatctatcccatgtaactccctatgagagatgtgatattatggaaggacctagggcaacaaacatactttagcctcaatttacccagctgtttaaatgtttgcctctgaagttgttatagaagttgacaatattacagaaaggttgtgggactgggactctccaaagaaatccccaaagtagttatttttcactctgatttacttttagacagatatcaatgtcaaaatgtcttcatatagtaatgtttcactggcttgcctgatgataagattctcatggagttctataaaaagatatgcccaagtatctgtatttatagcatgtttggaaaataccgcatcaaaccagcgtgatttaattaattaaagaagaatatattttaagagtaattttagaatttcaggtagttttgctttgtaaaatactttgggcagaatcttgaatattggagaaaaatgattgctttgcttataccaccagtattgtttgatgtttatttctataattctctttttgaaagcatgtattacatatccaccagaaaaagttatggagcaaaggaactcctgcacattgctgatgggaatgtaaattaacacaatcattttggaaaactaagtagcagtatccactaaagctgagcaaacacatacccttgacccagcaattccgctcctactgcacacccaatggaaatgcataagtacgttcaccaaaagacacrtactgagctattcttagtcattattcataagagctcagaactggaaactactcaaatgcttatcatttgaatgaataagtaaaatggagaagtaaagtatagtatatgcatacaaagtatagtatatgcatacaatggaatactgtaaagcaatgagaatgaacaatcttcaactacatgcaacaataagaatgaatcccgcaaatgtgttgaacaaaaggaggcagacacaagagaatgaatgaggcagcgtgatttcatttttataattgcaataaaggcaacattcatgtgtgctgttagaaatctcaaggatttgggttagaacaggaactcaagaggtgattctggagtgctagcaattttctgcttcttgttagagtgctggctacatgggggtgttaaacacttttatgtgtatatatatcagttattgtataatactcaggctttaaatgttaaaaagaaataatagtttaactgtagtttgctgattttctggttttcctaaagtgctatagttatgtaaatatttcaagaggaagctgagtgattttacatgggacctgtctgtactatttttgtaactacttgtgaatttgtaattactttaatttaaaaacattatttaaatggatgctaaatcaggtactcgagctaaagtggctgaatgagctatatgaaatgtttaaaaattatccatgtaataatattaaacattcaaagttgcttttcaagaaagtggtggctgaaacccttgctttctgtcttttgctcctctgtgggaagtttcttattgattgattgattgtagagatggagtctcactatgttgcccaggctaatctcaaactcctggcctcagatgatcctcctgcctcagcctcccaaagtgctgagattatagttgtgagccaacatgcccagcctgtgggaaatttcctccttgaaaagcaacatcaacattgttttaaggctgtataggttatcatcaataaatctgaatgactattaatacaaccagtcaaaagggtctcttgtacattaaattaaaataaaataggtaacaaaaattattatggtagacatcaaatatttgatagcttccaaaatctctgtagtctagaatttgggcattctaagtcaaccacatctattaatcactttctgtggttctcagaaagatgtatattgcagtttttgtgtttttgtaggttttaaagcatccatgttctagacaacttgtttgtccatacaatacttcacttgaattttctttaaaaataaaaaaaaggcattataactagggtaccagtttaaactttttttccgtatctccccaggacagctattttgggatattttggggacatgggaagagggctcctattttgttttctattttgccttaactggtatacatagtgggtactcagtgagctgtgatggagtcgtgcctgccttgtgggtaatatgcacatctttcccttggaatctccttcacataagaatttcagatctcttattcagtattccttgttgtgaatgagttcatgaggttcctgtggaactcattacaattaggcactgacattctttgtcagtaaaataacatcagacctaggtaattcaggttgattatgataagcaaacaatttggttgtagacacattaccttttaaatgcatgtggcagtgtcataaatgtcttgttcaattaccccttgatgtggttctaaaagtattttaaccctgctgtgggatgccgtgtgtcagggaagtgatctttcaaccatgtgttgcagattttcaaccaaagtgtcctgccatcataattgaataaaaacaatcttttctctgtccgtaagaaagaaatcaatgcacagaaaattctcaatttgattttcaacaatactttttacttaggcttactatttgctaaaggaacacactagcaaatagcaacaacacaactgattaagtaatgaatgaatattaagcctaaactccaaagcagggcattatactaattttaatatatctcatgtttttggatattaatcgtgttatataccctcagtagggtatttttctgctgcaaaactttagtgtttgtgatagagtacaatgtaccagtttagaagacagtgcaccagtacttcatgctattcctgtaaagagtgtgacatttcattttaaagactagcactacctcttggtgcaccacctgcagaacaggtatgaaaaactgtttcaagagatctgagcattgtattaaaatattcttgctaactaaataaaagggaattaagctttgggatataacttaaattagttggattttataaattcattactttttctattaagttacattttccgtacttctcagattcttttttataacatcaagatgtaattggaataaactgcacatatttaaaatgtgcaattacatcagttttagcatctgcgtacacatgtgaaaacatcagcacagtcaacataatgaatgtttccatctcaaaaaatttccttgtgcccttggtaatccagtcttccaccctgttcccaggcaacactgatctgcgttctgtcacaatagattatttggaatgatttagtatgttatctaaataggattatacagtatgcatccacttttttctttgccagactttttccactcagcataatgaatgtaagattcacccatgttgtctcctacatcaataattcattctttttcatcccttttcatgctgaatagcattccattgtatagaactactacaatttgtctatccatgcacctgttgatgaggatttaggggtttcttcctctacccctatttttggctattataaataaagttattacaaggtttttgtacaagtcttttgacaaatatgtttttgtttctcttggccaactatgtaggagtggaatgctgaggccatacggtttaattttttgagaaactactaaactgatgtccaaagtggttataccatcttacaaacctctagtagcgtatgtgagctccaggtgcttcacatccttgccaacacttggtgtagtcagtcttctaaacttttgtcaatgtagtaagtacgtagtggtatctcatacttcagtttgcattaactaatgactagcataattttatgcagcggtccccaaactttttggcatcagggaccagtttcacagaaccacagaagacagtttttccacagacagggcaggaggggatggtgtcaggatgaaactgttccacctcagatcatcagacattagattctcataaggagtacccaatctaggtctctcacacgtgcagtccacaattcggtttgtgcacctaatgccgctgctgatctgacaggaggagctcaggtggtaatgctcctttgcctgcctgtcgctcaccttctgtgtggcctggttcctaacaggccacagactggtgtggcctggggattggggacccccgatcttctttggtaaagtgcgtgttcaaatcttttgacttttttttttttttttgagacagagtcttggtctgtcacacaggctgaagtgcagtggtgtgatcttggctcactccaacctccacctcctgggttcaagtgattctcccacctcagcctcccgagtaggtgggattacaggtgtgtgtgccaccatgcctggataatttttatatttatagtagaggtggggtttcaccatattggccaggatggtttcgagctcctggcctcaagtgatccacctgcctcagcctcccaaagtgtgggattacaggtatgaggcactgtgcctggcccatttttaaaaactggactgtttgtctcgtgactgagttttgagagttctttacatactgttggatacatgtccttcatctgataaatgtgttacacatattttcttccagtctgtggctgaccttttcattttttttttaatggtgtcttttaaaaagcaaaagtgtttaattttgatgaaatctaatttatcaatctttcttttatgttttgtaatttttctgttctatgtaaaagttccttgctatctcaaggttgcaaagacattctcctgttttcttctcgaagttttacagttttaggttttacatttaggtcttgacccatttcgagttatttttcatgttgttacttagcaaacttgccttgctcctgatctcaggggaaaacagctccatcctttaccattaatataacgttgactttatcagtttgaggacattcttgttactcctagtttgctgagactgttgtgaatggtgtcgaagtttttaaaaaatgctttctttgcatacgttgagatgattgttttgtctgccattattctcttaatgctgtgaattctactgcttttctaayrttaaagccaacctttggtgtgtgtgtgtgtgtgtgtgtgtgtgtgtgtgtgtgtgtgtgtgtgtgtttactattatggaaatgattgaatttaagctactattttattatttgttttctgtttgtctcttctgtattttattgtatttttcttctttttctgccttcttttggattattttagtgttttttaatttccattttaatctacttgttgactctctggtggtatctctggattagctttttactggttgctctgaatattaatgtatgcatatctaaccattcatgacctgcttgcagtttaacttggtgtcatttcacataaaatacagaaacctggcagccatttaagaccctttcccccagcctaatctttttgttttaggtgtcaaatgtattacatttgcatacattgaaaactatcagacaatattataacttttctttaaaatagtcatatatatcttaatgaacttaacaggaaaaaagtagacgtttacatttacacaattatttgttctttcctcattcctgaatataaaagtttcctttttatcatttatcttcagcctaaaaaacttccttgaatattttttttgaacagtcggctgtgaattctgttagtttctcttcatctgaggaggtctttattttgcctttattcttgaaacacattttgattaagtattttcctttagtgctttaaagatattatttcwttgatttcttatttttatgatttataataagaaatctgtgacagtttaaatcattattcacttatgtgttcagtgttttttcctagctgctttgagattttttatttatctttggcttttaatagtttgattataatgtgtctaggcataatttttcccttctgagtgtatcctgtttgggatttgctgagctgctgaaattggtaagtttatgtatttcaccaaattatagaagtttggggcctttatttcttcaaacatatttttctgccccaatctcttttttcctctccttctagtactcctatgacatatgtgttttctcataggtccctggagttctatctatattttttaaatcttgttgttgttgttgttgtttagattatataattttattgttctgtcttcaagttcactggcttttctttctgtcattctgttattgtgcccatctagtgatttgtttctgttggatatttttatttttcatttctacaatttctatttgtttttttctttatagtttctgttcttctgctaagaatttatatttttgttcaattcaagtatattttctcttaccttttcaagcttagttatggtacctgtttgaaagacttatgtctaatctaacttccaggtcattcagggttgctatctgttatctttccccttgaaaattggtgttttttttgttttgttttgtttttttttgtttttggttctttcatgttgaataatttcagattgcattttggacattgtgaatataatgttgtattaacactaggtcttgttaccatattcgggagaatgttgatgtttttattttagctgccagcttcttttatctcacctttgttatattgatttgggtctgttaggatgcaaggattagtctaagacttgtgtgcatggttcagatctcagctcagttctttaagccttttcttcattggcttagatatgttttgcgatactctttttcaggggttaggctgaaacctgtacattccactctcagttcataaggcctttgccgtgctggtttgagtttgaactacatgtgtgtagcacagagaggattcttagactattgttgactcatacacagaagtgaagtattttcttctccagctttcttctctcctggatttcctccacactttacagcccacarggactttttctaccccccgtcccaagttctttgcaccagaacgttagggcttctcttggcattttgctgcagattctaccatgctgctctgcgaaggattcccacccttggggcaaagctaagaggaaaatagagttaaactcctccccgtgcagtttgactcccctctacagtctacctgctttacttattttcaaagtgttcgggtagtttcttggcatccatagtttttagttgggatctgcaggaaggatggcctgtagtgggtttacatttgccatgtcagcactggagtgccttgggctttgttcatgttgtcgttttaatgaatcctatattttctgctccattttagttcgttaataaataattaggcaagattactgaaaggttagaagttcaatagtattctaagatgatgctatttatgactttgcaaaggaggaatgagtagcacacagaagtatttggcttcacttggctggtaaaacaaaactttgatggcatacccactatgtcccatgagaagaagagagtcaaacagtttcagagtttatctaacaacttagtggttaatagatttgctttaatgaatgaagatcaataaagataataagcatattatttgcaaaaaaaaaaaaaaggtttttttcctcaggagtttaaatagcactcttgtatcaggttagagagccttcaaaatagcaaataatagcagagacatacaatgcaattaactttttaacccatcttcaaatcaatataattttaataacagtggaaaatctggatttataacagcttactrtattttattagctaatttgctttttaaatacatttttaaatcctgttgaaaaaactaattaaatacccttgatttcttttttagtattttccttaaggtggctgatgtgggcttttctaaactccttttcattaaatcatagataccaccagagcaagaagaagccaggagagtgatggtgttgaatacattttcatttccaagcatttgtttgagacagatgtacaaaataacaagtatgtggacatttttgagaattttyatgtgactgttttttataagcacatgcctgtcccgttttagacaactgagagttctccatttgaagtgtattttaattatcataataatatttgaaacagatgaaaaggtaataatttggttggtaattattgttaatcttcacctctaattttttagtaacctggatttgcttcatttctatraaatgtgtagacactgctttgcagaatgagggaaggttgcaagtgtcttattctgacctccttccagsccactaattgaatcttaacatgtaatttggatagaattttacttcaaaaaycaacaactatgtagtatatcactaggtccagcrtctgcttcacacacctgcrtctcattctctcattggctcttcaaaaaattgaaatgatgataattaacttgctggtaccgtcttctctagctagctccaagcccaccccagtgccccctgcccaggttttccatctgctgaggcacaaatattttaggctatcagaagcaatatgtgttttaatgcaggattgtgggattttattaaaacatcgaaatgcttttttcgygtttggcgcagtgattgtgtttttatagcacatgatcgactgccctggctccattagccaccacccagcgcctctagttctgaagcygggctgggttactccgtagcgtgcaatgaaattccagtagtttctattgtttggcttattcaccattttattgcattgcattagttctgaagaaaaagggggtgatggaaaacattagagccctactagactaaagtactttttttctgcttaagtgtaatttaagcaagtgttactgatttgaaaatgtataataaaagattttttaaaaactgacattttgaaatacttggctctgtttatattattaaacacagtttaaaaaaattacgtgttcagcagaaaygtcttttacctatgaattttatcttgccacctataattgttttaaattcacaaatgattccaatgcatttaattttttacaggtttattgaatatggagaatataaaaacaactactacggcacaagtatagactcagttyggtctgtccttgctaaaaacaaagtttgtttgttggatgttcagcctcatgtaagtaaacaatgagctattcaatacccttctgacccatgtcatctacagcacctcatgtgagcatttcagtatgaaataatatgaagtcaactcacttttggcatatatgtggcttttctgagatggcaaaagcatttaaatataattggagacatctttggtggagaaaaagaaaagcccataatattattagaaagagaagtggaggaagctccaagacctgtgtttgtaactcttatttatattcagtttttgtcaagtaaagcaactcttagatgtttctacatattctgtatttttaaaaaatacatcacattgttacatgcataatgcattcttatgtgttatgtattagtaacagtgtctataatttttaacgatggacattttggttccaagtctttgactttggttctgtatatatcctagcaaataacccccyactagaactgaagggcattttgcaggaaatgtactgaatgaaagccccattgcaactgccatgtctgcacctgtcatcctggaaactccattatgaacattytgaactgagaacttcagtggatgaggccattcaattccctatcaaaccatacatcttccagcagatccccagcccacagcattttcctcatcccccagggaccatggtttctccttccactgatggctgtaccctggggtgcaaaacctccaaatgctagaatgacctgcggaagccctttggacctytaaaggaagatgaatctggagtaaaagtgtttcaagaatcaggaaggctgcctcctgacttgggcactgtgttagtcccttgttgcactgctctgaagaaatacctgaaactgggtaatttactaaaaaaaaaaaaaaaaaaaaaaaaaaaaaagaggtttaattggctcactgctctgcagactgtacaggaagcgtgatgctggcatctgctcagctctggggaggcctcaggaaacttgcaatcatggcggaaagcaaaggaggagggttgagcacttcacatggccagagcaggaggaagagagagagaggagcgaggtgccacacacttttaaacaacagggtctcacgagaactgactattgtgatgacagcaccaagggggatggtgttaaaccccrggaaaatgcccctatgatccagtcacctcccacaggctgcacctacagcagtggggattacattacaacatgagatttgggtgtggacacagatccaaaccatatcaggcaccaacagtgaatgggacagtcctgcttatgcagagcctctctgctggtgtcccaggtccagttgctgtcagactcccacagtgtagtatcagctcatgaataataactttcagctctcaccctctgtagataggtccccagaagtatagagtatagaacatcaaagatttgatgaaggaatctagacaggcatcatggagagcaggaggctgcccttgtagggtactctgaaggatagggtgaaagaggagaactcctgcctgaaatcagaaaggggcttaaaagggatggttggaagacatttgtggacagaaagttatttaactcatcacacctttggaatatttgatctaaaaaccagttttgtgatatttttagtcacttctgttcaatgttaattatgatgtatttcagaacattttaaaatgccaagttacattccccagcttcttttcagaagtgtttgttacatttaattgtcaacagttaattgaataataatatattgaaatgactactgaccttaaagaataattttgaggaattttctcctagaaagaaaattcagtaattcatgatgctatggagaaatgtgagaaaactttcttttcttccttgtagacagtgaagcatttaaggacactagaatttaagccctatgtgatatttataaagcctccatcaatagagcgtttgagagaaacaagaaaaaatgcaaagattatttcaagcagagatgaccaaggtgctgcaaaacccttcacagtaagtataatgatgcttgggggccaggtgtggtggcccacacctgtaatcccagcactttgggaggccgaagcaggaggatcatttgagtccaggagttcaagaccagcctggccaaggtggtgaaaccccatctctacaaaaaatatggaaattagccaggcatgatggttggacacctgtagtcccagctacttgggaggcggaggtgggaagatcayaagaccccaggagactgagagtgtagtgagctgagatcacactactacactccagcctggtaggcagaggtgggaagatcacaagaccccaggagactgagagtgcagtgagctgagatcacaccactacactccagcctgggcgacagagtgagaccctgtctcaacaacaaccacaaaaagcttggagataagatataagcagtagataagatgtaagatacagttgtatatatgaaaacatatatacagctgcatgtacttgggaagagtataatagatacaaaaatcagtgaaagaattgtatttaggtacataccttttgaacagttacacttcttgtgctttggtgaatggatcttcatattcaattgactcaaaactattttgtatrctattatgtgaacatttcatactattgtaggctgaacatttgtataaaatctagaccaattaattttcagagcagccttatttttaaagctaaaaataccatcagtaactgttactcattaagagtccaaatgaaaaatttaataatgtgccttgcttgtctccttgtgtcaacaattatatttagcacagcaaaagaaaatcactattttgggtataggataagtagaccaatattattcagcaataatatttgtattttctatgagtgttattggaaatgatgattgtggtatattcatgactatwatgggttctggcaagaccttttattgtttttcttcttaatcttaatatattctacctttggaccaaaaatcaaaagcaaagaaattaaatgtgaagagcttatttttttcttgcccctcttaattagctcatcattaactttagtttatattaatttatgaactgttcattgtggttacaaaatacagatcacatttctgattcccagtatatttgataaatacctttttttacatgccaacagtacatatccgttctgagtaggtactgtcatacaatgttagttactcaggctcttgatcaacactaaaattaaattttctgttattgtgaaatcttatgtgacaatgaaatgcagactcaaattatttcagcatgttgcaacataaagatttattgtactatttagacattttaaaggtttctcaacgaagataagaaaggatcacatattcttaggatttggctctcttacatttatgttatatagccaactaaaatacttcctggctttaaaaatgtgagacacgaaggctcctgaaacacttttaatgagacatcgaaggaacgtggtaatcagccgggcgtggtggctcatgcctgtaatcccagcactttgggaggccgaggcaggtggggatcacttgaggtcaggagttccagaccagcctggtgaacatggagaaaatccatctgtactaaaaatacaaaaattagccaggtgtggcggcacgctcctgtaattccagctactcgggaggctgaggcaggagaattgctaggaccccggaggcagaggttgcggtgagccaggattgcaccactgcaccccaacctgggtgacagagtgagactctatctcaaaacaaaaaacaaaaaacatggtaatcatccttttacaaatttgtccaactctgaaaaaggagtttatattataaattccttcctatgaataagcataaataatgcagccaaaacatcagagtaaacaattcttttctccaatagctattttaatactgacatttccccataatgatgactagtgactcattatcctgcaattcagttaaggcaggagttttgactcttgccagagtagttttttgttacaagcaaatcatagaaatagtattagaaattatggcttctgaagcacttgtggttaaagaggatgacttttatttctggctgaggggaaagactgaacacagaacagcattaggtaaaccaattgtagaatgtttgcattgatatgaagtgaggtaatggcctggttaaccaattatttttttaatacttccttttgtaggaagaagattttcaagaaatgattaaatctgcacagataatggaaagtcaatatggtcatctttttgacaaaattataataaatgatgacctcactgtggcattcaatgagctcaaaacaacttttgacaaattagagacagagacccattgggtgccagtgagctggttacattcataactaagagaaatttccataattgtctttttctatagagtgcatgatgaaatcaattacagttttggtagtagggtttttaaatctrtatcactgtcatagatrtacaatcttggttcaagttgaatgctggttttgtttgtatctttttacagccttatttcaaacgccatgtgttagtataagatccgaaatcaaaatatgcacagtactgtattctaagcaaaacctcaaaccttctcgttgtcttcaataccgctctatctccaagatgaggctgaaattttcagagagacttagctagaggcttagtatgtatgggagttcagcgcttctgctggtctcaggtgtggctgctgctgtcgagtttgaatgttagctgttgaaggtatcaattcagcagccatgagcagctccagacagacaggtgagctctgctgtttctgggtggatcatcacagatttagccgggcaggcagtaaggtgtcctcttactattcaaaaagtgtagactttcttacatattcgcaatacgttcacagtgtgtgcattttaaaataattcttaaaggagtaactgaaattttaccttgagtgaatggccttcataatatagcttgagaagtccttttgagtacctgtcagtgactcaacaacatttaataagggaaagtagacttttaacagttattatatatgtaacgaaaagcctttcctttgggattaatataagtaagaatggtagccttgtggcaagaaatgattacaaaggatatttttatttgtaattcctcagaagacaatttatgaagtcacccaaaatgttattttagctggttttggatttttccaataaattagaagaaggatttctattctaaaacatgtaaaacctgttttacatattactgatacaattaaagattatttttcatctatgtgcaatagatcacccctctttaaattgctctaagatttattttagaaaacttttcatgtgatgttatttctttgtcatcaaaatgcttgttaacactgtccagacaccatcctaaccttgccattgttaaagaagtttaggaaagactcttatattgtaaatatttagatgggttctctcacttttctttgatactactgattttcagcaagtgaattatataattcaaaatgctagaaatgtctatccgttctataagagagcatatcctgccgttcttgcatgcagtgaagccctgcccgtcgaaaatcattgcatctgtgactttcaaagtggaaaaaaaaatgttatttttttgttgatttgtaaagagagtttaaatgtcatgtgaaaaaaaatagaatgtagtaaaattctatatatttatgaaatattttaaaggcatatttttttaaatatcaaacggggctattcataaaataaactgattgtatgtcaagatgtcctaatttaaaagagtagttttataaatcatggtcaacattccatgtaaatatttgagctttacaaagatagatccaagtgtgcgatctgtgcactgcacatttgatagcattattcactggttttccttcatacttgtcaagttcatattagaagcagagacaaaaaccactccaatggccttgacacatagtcacaccaaaatagataatcagactaagtattatataacaacgtgatccagacagtgagttctaagtgtattaattaaatagcaaaaaattttgtttttaaaaaatgaaagagggagggttgccaacctgaagtcttaagtagattgtttgggtagcatatttccttctttgaacattgtctgaaattttctataaatcaagacttcttgtacaaagaatgatgggacatatgtaataattcaggcaatcacctgagtaatttaggcagtccaaattctttaccctgaaatacccacattttaaaaaaattgcagataattgcttcagttatttactttggggacagagatatagtgtaaagtgggagaaactgagtccttttttggtggtggtaataataagatgttataaaaatataacattttaaaaaagaaaggtccagaccttaagcgcagagctagaacaatattttttaaataatggggggaaaagggggcactttggtaattttagaaatcaggtagtatacttttttttttttttttgagacagggtcttgccatgttgctcaggctggtcttgaactcctgggctcaagcaatcctcctgccttggcctcccaaagtgctgggattacaggcatgatccaccgtgcccagccggtagacgtggtcttaaaaacagtgtttacatggccatcttgatgcttagaaagataattgattaaaatttaataaggcagggccaactccgagagttcattgacaacggcagcaaaaaggccctgaattctgtactttcttcccccagcctccttctccagcaaggagaatagcactcctccctccagaagccagctccctaagttggagccactatgtaagagaagaggaacgttcactttttaaaattcatatatttaaaaatcaagaccaaaaagtaaattctgtactcctattattgactgtagtcaatcaaacataaaaaggtgaaagtaaaatttaattttttacccttattttactgaccaatatggaagttcttggtatctttaaggctgaccttcctggtattgtgtaatgattgaatgtatctaaactgtaataatttgaaactgacaaacataaccttctcagacttacaaaactatgttctttctaaagatacagatttttattattttattttgactaggaaggatttataaataaatgtaatgaaaaatctttgatcttaataaagtaccttcaaacagtgtgtgtacttacttgaaaattgtttttgcacttggatattctattttattatactactattgtgatctattccattatactatttcccatggtagaacaaattatattttctactgtgatatgaagtgatgtaattgaacttgccatgtctaaaattaaatttcatatttttttcaatcaaacactgctttcatcgaggctgttggagagatggaattcactagtgttgttcttacccatacattccagcaatttaaaaatgtggagaaccttagtgggaaggaagaattaggaccatcaatgatgggaacacacctcccccactccccacctcctctccctccctcccactaggaatcagtgtcacacatatcctcttcctgagctccagttaggcgaaactcaactttttcaactgtgcatataggaacagattgtcatctgctatgcaaactagctagcattggccttgcttcagtcctcgagccagttagccccagctgtgcatccatagaaaggttgctctgaagagcatttaaaagcatttaagagcatgggatctggagtcagaattcttcagttcacattctgattttgcctgtttccagctctgcagccttgggaaaaacactgaacctctctgtttttcattttctcatcagaaaaaaatagggacaagaacagtgattacctcatgggattggtgtgggcatgaaatgaaagaatccatgtatacttagaacaaaacctgggacagaagtgttcagtaattgtgagctcctgttgtataatggtcattatcatcacatcacacaatttaaaaatagctgtgtaagtattctcaatcaccctacataaacagttttcctattagtaagcccactggaagtttacaataaatcattttttagaagctttatttttttttttgtttatttttttgagatggagtctcactctgttgcccaggttggagtgcagtggcgcgatcttggctcactgcaagctccgcctcccgggctcacgccattctcctgcctcagcctcccaagtagctgggactacaggcgcccgccaccacgcccggctaattttttgtatttttagtagagatggggtttcaccttgctagccaggatggtctcgatttcttgaccttgtgatctgcctgcctcagcctcccaaagtgctgggattacaggcgtgagccaccaggcctggccagaagctttatcatttttttaaaaatttcatagcttcctaccaagtgacacatcaggaactaattaggtaatccccaataggaagtgaaccaatttttattttcaaccactgggtatgcagtgtaactgataacaattagaaaggaatgtcccttagttgtattaatgccatttcttctactgccaccgttttatccccaaatgcgtgttcagttacacttaagcttctggaggacagaaaatattttacttttgtaacagctatcttatacacatacacaggcctaatcactgcctggccaaattgtacttattaatcatagaacatctttataatttccatacatgatctcatttaatcccacaactatcttacatggaagatattatcttcatattttacagtggagcaaactgagcagcagggctggagtaccttgcccagggtgacattggtgatgagcagtggaatcagggctggaatgtcgtctggcatcctccagctccacgctgtttccactgcattgtgctttatcatgtttctgtaacttgaggtaaagctgggaacaggttaagatttgggtaattagaggaatgattgttcatacttatgcacatgcagttggcaaataattttctcaaaacactgttgctttagtcagatacaacttgatgtatccatgcctgtataagtgggttcctcttcaaacaatggctattatcagaaatgtataaaaaccttagatagcatactatgaaattttctgttaagtctgcctgagttccagtccctactcaagattggcctcagtcaatcatgataatctcctttttgtagtgatttatctgggccagtcatgctaccagtttgaggtcgtgtctgttggaggagccatgagaaagacacatttccctgatgtaaagaaacaactgcatgaaatgaaaatcctttatagtcctgccctcatctttctgcttgagatgctcagttgtggtgcttgtcaatatgacggccataatcctaaccctacatcagaggatgataaaggccaatgtactaaggatgactgagtgaaaaagatcctaaatccataatattgaactgctgaaccaatcctgggacttccttcctctaactgttaaattaaaaaaaaaaaagttctgatggtttaagtcattgcttccttgctgctgaaagcactcctaatttgaaacagtattcatgagcaactcaggccattctcaatatctacttttcacttagcaaaggttgtccttttgctcagtggtcacacaccctgcaatgatacaattactgagtgttaatacactctatagaatggtccaatgcaagacgttccatttaaattttatttttctcagatttcatttctttttcctgctcaatatggataacaatttaaccttaaaattcaagttcagaaaaaagttgttcttccttaatgtttttggatttacaaatttatgatggttgtgttctattagtcactcaaaatatgttataaattaaaaggctgactaaacactgcagagtctaccatttcaaacaaagtaatgcttgtttaattgtttaatttgactagggcaagaattataccaaaaggttccatttgttaagcccttgctctgtgccaggcattgctgcttagtagtagataagctgtttgtggtaatcagtttcacttaaacatagaaaagttctaaatagaaatatatttggataactacaaaatatagctacaaaacatctattgctgtaaatgttaaagggatgcaatgtagcataaagtaaaaacttatgaaaatatattactattaggaatctagatgatgtcacaataayggaggatggaagaaggaaggaagcaatataaatgtacgtaaatatcagttaagtaattattttttaagaatttgaccggtctgggcaacatggtgaaaccccgttcgttatctacaaagaaaaaagaaaaaaaaaagccaggtatggtggtgagcactggtagtcccagctactcaggaagctgagatgggaggatcatttgagcctgggaagtcaccgccgcgagccctgatcacgccactgcactccagcctgggagatggagtgagaccctgtctcaaaaaacaacaaaacaaaaaaattgaaagcaatttccagtgagactataattaaatacgaagaatcaaaaagagaatccataaaatgagatgacagaagcaagaccaactgtatctctaataagagatttaaatggcataaattcatgtattgagacaacgtttcaactacattgaaaaatgaaaccaactgtatgcttccagatgagaaagattttaagtgagaagattaactacagtatgccaggcagatgcaaacaaagcagagagcacaaaaaaaacaaaacaaaaaaccagagttgaagtcaatgcttattaactgggtcaaaaagtcgttctttagtaattaatgctatgagccactacaagaagagcattgaaggcctaaaacaaaacatgagaaacataatcaccaaaaccacattacttgataatctgtaaaacacatctcttagaccgtgaagaaaaatggttatagagggtctgaatatcctaattcttcaggctgatgtcatagcattttatgaattctcttttagattctttgtatttaattttagtcccacagggaat

SEQ ID NO: 95842 - DNA, 18390 bp, Homo sapiens
gtagaatattttcccagtatggcatcaactagatttttaaatataaaatgctaccatttgttaacccctcacatgagaggcagattcaaggccacgtgcaaatcctcagctctcattttgtaaactagaatgttttatttcttgtcgttgttttgagtggatatcctaaaataaagttttcttctttccatcaaaatggctaaaataatttatacatgttttaggaataggcattttgtgaaaggcatccatttcactggacagttagacagcttttgaattcaaaatttgtccaactcatctcaagtaactcaagaaaacattgtgctaacattgaggctgctttggacagcattctgagctcagagagaaagagacaccacattttcaatgtgtggctacagagactttaggacaagtgaagacagcacctgcagttacagttttggggccgcattaccccgagggtgagtgccagtgagcacagggcacctcctagggccaggctcagtgtgaaactcacatccttcactcccacacctcctcccagtgtccctgtgaggcagacactaccatacaccacatccgcagtcaagaaaatggacactcaggagcttctgtcacttgcccaacagactcgtaagtgctagggctgtgagcctaacactggggccctgattcaaagcccatttcctgaagctaaatatgaggttcctaataaggtaaatgcaatattgagcctccctcaacccccaccctttttgaaaagtaaagctctcagaaactttgggtgctaaatcaactgcttatgctggttaaattaatgttaatgctttaaaatggtaatatgctagaatatatggcaaaatacttcgggttcacctttaaaggttcccatccattatctatttactcataggaatttcctttaaaatatatacatataaaaaatgcaacgaaagagtatatatgggatgctgccaactcaccctaaaaagtctttaccacaaatgaaatcccatcctaacaaattctcaaagactatatccttcaacgaactgttctggaggtaatgcgatatcaaacccatattgctgacttttgctactggctgtgaaggcttgttgggagtcgggagaggaagactgtagaagaattacaagaaaaaaagaacacaggcactggctctaattagaagagcaatgtgttttgaaacaactccctggaagtactttaaccctggacaaaaacataaaatgtaaaataattccactctgagaattataactggaaatcattcctgttcttgtgcagattctggcactacataaacgggaaaaaagttaaccaccatccttgaccataagtttgacaatgatttccactgaaagatactctactgtatctcttggatgctagatggcttcagtcaactgaacggttaacttttaacattattcatggcttggaagctgttttgttccactgtacactatatacatatttaacaatgctacctttcaaaggctgcagatatggagggctaaaagattattaaaatataccaggtctaggaaagacaatttaaggaaagacagtgcacgaaaaaagccttgaaatgctctcacacacaaacccccaaatttattttattttggagatagggtctcactcactctgttgcccaggctggagtgcagtgggcatgatcacggctcactacagcctcaacctccctggctcaaatgatcctcccacctcagcctcctgagtagctgagaccacaggtttggctaattttgggacccctaatacttggctaattatttttttattttttggtagagaaggggtctcactacatcgcccaggctaacccccaaattttagaaactgtttgtgatctagtaatacacaaggaaaataggacactggaatgttaaaaataggtctgttccagacaaagaacttgcatacctactccatacataatacacagggtaacagccactctttctacagcctttacaagaagtatcttaaacatctttctatggaggaaaaaatggttcaaaaactcagtaagaacacttttttatgagaggcatattccccgcacttacaaaatagcacctacatttactggaaattaatttagtgacagaaaatctcatgtttagtaactaaaccttcattattttttcattaaaatagctgacttcacaatatagaaataaaacagccacaacaaaaactaagaattgctaggaaatgtttgcaaaactgaaaataatgttcaccattatcttaaaaggaaaaaaaaaaagtcaggccatgaaaagtttattcctccaggaattttcatattacccactagatgttatgttcaagtgacagcaacagcagtgagatctccaaaggctacatttacaatagagggcctgactgccttaaaaagcttgtgctgatacattgtgtgtattgaaacattactctgtgatccataaacatatataattattatgtatcaatttttaaaagatttttttttaaaaaaaaagcttgtgtggcaaaaccttgtctctacaaaaaattagccagatgcctgtagtcccagctgctggggaggctgaagtgggaggatcaccaaatcccaggaggttgaggcagcagtgagccatgatcacaccactgcactccagcctgagtgataagagtgaggccttgtctcaaaaaaaagtttatgttgaaacaatgacaaactaaactgctggggaccttggttcccactcagcagggcagtccagcaggcatccattctgaagtttcacagtgaatctaagccagagggaagatttaactgggccacagtgaaagctggtgctgatggaaccaaggtagaaggccacagcaggttaacactgaactggccatgtccctgtctctatacaggggagggaaaaactcttagcctgggtattttcccaaaggacaatggctacccttggggcctctcttcatttaattattataaactactgaaaatacccaatctcctgggctcggcgcacagccaaatttacatggggtatcatttggcagtgatgaggggctaactcacttctgtgacaggaggaacagaacgctttcacaagttatcttaaaaacaacaaactagctgggcgaggtggctcacgcctgtaatcccaacactttgggaggctgaggcaggtggatcacctgaggtcaggagttcgagaccaggctgaccaacatggtgaaaccccatctctaccaaaaatacaaaattagctgagtgtggtggtgcatgcctgtaatcccagctacttgggaggctgaggccagagaatcgctcgaacccaggaggtggaggttgcagtgagccaagatcacgccattgcactccagccttgacaacaagagcgaaactcctcctaaaaaaaaaacaacagaaaaccaaaaaaacaaataggccgggcgcagtggttcacacctaaaaattcccagcactttgagaggccaaggagggtggatcacatgaggtcaggagttcaagaccagcctggccaacatggtgaaatcccatctctactaaaaatacagaaattagctagcgtggtggcacatgcctgtaatcccagctactcaggaggctgaggcaggagaatcgcttcaaccggggaggcagaggttgcagtgagctgagactgcgccacttcactccagcctgggtgacagagtgagaccctgtctcaaaaaacaaaataaaaggacaacagaaaaaaaaaaacaaaacccaaacccttcttcctatactaaagtcataatacaggggaagatatgacaaactatggtatctggtttatctttaatcaaaattcttataggagaagtagtaaaaagctttactttcatttcaagaacatttttctttcctattcaatttctatggtcaggtttaatttaatttagaaatctcatataaaatgtataaattatgatggtttcatgtttataaacataagtattgccaggcgtggtggctcacgcctgtaatcccagcactttgggaggcctaggcgggtggatcacgaggtcaggagtttgagaccagcctggccattatggtgaaaccctgtctctactaaaaaaatacaaaaattagccgggcatggtggcatgcacctgggaggctgaggcaggagaatcgcttgaacccgggaggcggagattgtggtgagccgagatcgcaccattgcactccagcctgagttacagagcaagactccgtctcaaaaaaaaaaaaaaaaaaaagataagtattacataatttataagaatgtctttaaattaggctgtaaggttccatgtttggggcagaaaccatttactgaaccagtggaacacactgcggcctgacatacctcggcagtggctgctatttattttggaagcatgatgggtagaaataaactgtacgatgaaaataaatacaacatctttaaaatccacagtcaatgttaacagtttttgttggctcagagtttaagaacacaaggataactaaaaatgctgcctgtttgaggcattatccaaacagcatttgtaaaaatgatgtggaaaggcaagggaccagtgtccaacctgagctcaaataccagtcacacgtacatggtcttctgaaaaacaggaagtaggaataacatgcaacttttaatggaaaccaagtcaagattcttaaacaagaaaaacaaatactttctaacaatataaagcttgacatgttacctatcaatcttcttccctaaattccagagaatgatccttgcgtgtaataattaattaactgaaaccttttggtcactttttgctattgctacacctattcatgtacctctgtagactcaagacaaacaactacatgattatcaaataatgttattagataaagataccttgtttttaatctatgacatctttcctaaaaataattcagaaacttttttttttttttgggagacacggtctcactctgtcacccaggctggagtgcaacgggataatcagggcaccaccacatgtggctaatttttaagttttttatagagatacagtcttactatgttgcccaggctagtcttgaacacctgggctcaagtgatcctctgccttggcctcccaaagtgctgagatcacaggcatgagccactatgcctggcccagaaactcacttcaacaggtttaagtgtataatcatcaaattcctcttaatttgtcacttcttctgttggaaagattagtcttatatgcagaataatggcacacaatgaactttgaataaggcagaacaggacggtgtctatgtccaaagtaagtatttgagatttttcatctccctaaataagggcaataacatgaaaatatgctcaacatcattagtcattagggaaatgcaaagtaaaactacagggaactaacattacacactcattaaaaggtaaaaattaaaacatctgaccacagcaagtatgccagaggctatataataaatggctatcatacattgctggtacaaccactgtggaaaacagtttggcagtttcttaaagagttacacactgacaaactagagtgacagaaggcgtatcggcaattgccagagatgtggatggaaagaaagaggataaaaaggagcataagaacactttgaagagtgagggaaatgcttgttatcttgattgcaatgacagtttcatgggtgtgtatatgtagtttagtgtatttcaataaagttgggggggagaattacaacaccctaaattgtatctgttgttcttttaggaagcttaaaggaaaaaatacttaaattatggtaataagaatgcacctggagctcaagatatgagccagcttcgagccacaaagtctggacttgtcgtgagggcagtcatttgcatcttcatttttctttacttaaggaatccaactcctgcagaatcagaagaagaacctgcccaaccagaagtagtagaatgtggcttttacccagatgaactgtgttccgctttatttgaagggaaaggggcggccccccaaattgcaaaattttgcaaaacccctcataaatctgaaatacatgctcatttacacacaccaggaaactgctccaggatttctcgggggctgcatttcataaccagacccctgtctgcagaagagggcgatttctctttggcatatattataactattcataaggagctggccatgtttgtgcagcttctcagagctatttatgtacctcaaaatgtttattgtattcatgttgatgaaaaggccccaatgaagtataagactgctgtgcaaaccttggttaactgttttgaaaacgtttttatttcctccaagacagagaaggtggcttatgctggctttacaagactacaggcagatattaattgtatgaaagttctagtgcattctaaatttcaatggaactatgtcatcaatctttgtggacaggattttcccatcaaaaccaacagagaaatcatacactacatcagaagcaaatggagtgataaaaatattactcctggagtaatccaaccattgcacattaaatccaagacaagtcaaagtcatctcgaattcgttcctaaaggaagtatctatgcacctccaaataacagattcaaagacaaaccaccccataacttaaccatttattttggaagtgcttactatgtacttacaaggaagtttgtagagttcatactgactgacatccatgcaaaagacatgcttcagtggtccaaagacatccgcagcccagagcaacactactgggtgaccctgaaccgactaaaaggtaagaaagacccaccgatatggatgcctgtgcagtcagcagcaacagcagcagayagattgattgattgattgmttgactgactgattttgagacggagtctcacacggtcaccgaggctggagtgcagtggcgcgatctcggctcactgcaagctccacctcccgggttcacgcgattctcccacctcagcctccccagtagctgggattacaggcgcccaccaccatgcccagctaatttttgtatttttagtagagacagtgtttgtctatgttcgtcaggctggtctggaactcccgatctcaggtgatccgcctgcctcggcctcccaaagtgctgggattacaggtgtgagccaccacgcccggccataagatttattgaaaaaattgaacattttttcaattcagctatgtttctttggccttgtaaatgttcyacattttgcaagaccttccacttagggaaacaggaagttctctgattttaggggtctgaarttagctgaaagatgttcccaaaccagtctggctgcttttgttccctctctagaaagaagtactggcattttgcatctcctgagactttggaaaattctgagtataaatctttagaaagttcttcatttattttataaatactactggatacctactggtgtcaggcattgtgctaagggctctctgtaagatggaaaatgttaaagctagtaatgattttgtggcaaatctgatacttcagatggsttctctgagaggtagagggaaatcagataccatccttaagtggacttcagtattttctctttgtaaaaggtggactggcttctatagggagtgtggcttcaagcctgaacaactaagctaatcagcctagacagtggtgtacgatgagtccagtagacattggttggggtttttttaatataatttcatgtccactgcaagtytgattttcaaataatctccgagggctgttacagagaaaacaatccaaagaaccccaagagaatcacaaagagtactctscatacagcaagggagtaacaaggggtggagaaagggctgaaaaatgaaacccaagtacaaagatggggatccccaaccttggtccacctggatgctactgccagcgtagtacatgctcccacccscaaaagcactagcctttgatccgatgttacaagtgaaacatctcaaggaaggttggactttcccctctacttttctcattgactacctcatctagaggaaatggaaatgatagcacagaagaacttgtactaaaagaactgggaagcagattccacactgaatgctggttttgttttcctcttagatgctccaggtgctacaccaaacgctggctgggaaggaaatgttcgagccattaagcggaaaagtgaggaaggaaatgttcatgawggatgtaaaggtaaaaagaaaaacaaaacaaaacaaaaaaggcttcaaattttacaacaactataaaactgctgcctcaatcctagtgggcaagacggaggatcatgtttaaagtaatctggaattagtgatgatccaattagtataggttgagtcaattttttaaaaaaactttttatataagattcatayagaaaagtacacaaatcacaaaaaatacaggttgataaaatttcccaaagtaaatataccctctgcaccaacagctaggccctgccatatgtctccacacagcttcctacccagtggcaggaactactgcacagagatacaataactgattttaacagtgattttgggtagagaccttgggtttgaatacagtagactagatattaaaaataaactaggtttacccagtttttcagctgtttaaaagactggcctaaaataaacagattggagacaaacaaaaaatgtaaatcaaataccagactagttcaaagacaagtaaatcctgctgccaatgtgcacagccaccctcctgaagcagagggaccaggttagagagctggaacaattttctagtgaaggggttttttcaaaagcagatatgattcaattagggatccattcacatggtagaaaggtgacaggtaaacaacaggttaacaagagctctgccctttctttagaaagcaggggctccctgtcattacacacttgggtttgtcaggactagtcagtaaatgctcagaaaaagcagggggctcagattcttcctgaaaacaggagcccctcaggtgtgcacatggtataagaagtcataaagggttgatactatcaataataaagtaatgattcagaattctyaatgaaatcagaatgtttcaacaatgtttgaaaaaaaccctagttagtataaatcctaacaaagtcctcattccctaaaagtaartacttcagaaagttcttamcatcactagcttcagtatgaaaacggtactcacagttaggcagtagcgtggccatccwtggccagcattcagagtcagcaccctaagtaggccaagccctggtgtgtagggaggtggtaaatcttccgggtccgagctttgggcctgcactcaatcctcacaacaattctcaggtagaaacaatcattattcaccctttactgatgtggaacccaaggctcaggtaagtgaagtcactcccacaggcacagggaggaggggcagggctggggctcagactgggagcaaccgcctgccaccactacaatgggcaagctcccagtccgactctgcrtgcagaagaacagctatcccattagaaccagcaacaaagggtttatttttaatcactcaaatatcattaacacagctctgaaaatggtccatttatttgtattcccttctagttcaacttcatctgtgtctaaatggcacagctgtatcattataatcaaggtgtagctgagttgcttttcacttatgtcctaagtttctcccactgatagtcttcatatttgtaatcttttttttttttttttgagacagggtctcgctctgtcacccaggctggagtgcaggtggtatgatcatagctcactgcagcctccactttctgggctcaagtgattttctcacttcagtctcccaagtagctgggaatacaggtgtaagccaccaaacccagctaattttttatctttgtagatatggggtctcactatgctgcccaggctggccctcaactcctgggctgaagtgatcctaccactttggcctcccaaagtgctgagattacagacatgaaccactgcatctggcccatacttataatattaaagtagttaaatgtaactctactgagattctagcacattgtagcaaatatgtctatcaggtaaaatttgttaaatcatggtaacagctgccacttacatagtcttagaaacaacactggacattttgtgcatacatccccctgccccttttaaaaacagtatttccttaagataggttttttttggagatggagtcttgctttgtcaccaggctggagggcagtggtgcaatctcggctcactgcaacctctgactccctggttcaagcgattctcctgcctcagcctcctgagtggctgggattacaggcacgcaccaccacacccagctaatttttgtatttttagtagagacgaggtgtcaccatgttggccaggatggtcttgatctcctgccctcgtgatccacccgcctcggcctcccaaagtgctgggattacaggtgtcacccactgcgcccagccaagatacgttttttaaaagtaggattactgggctggtgtgaggaaagagagcaggaaggagctgggcagagaaagagcaacgtttctgaaataaacagacctccttccctctcacacatacgctgaggcctcacttcgctaatctgtttcctcccttgcaaaatgggaatgatgatggaatccacttcagagtgttactgtgagaattaaaagcaagagcagaaagagccaaacacggttgtcaaaagcacataaaaagtgtcactgagtctccaaggaatccagtcaccactggattccaactctaattcccactttaaaaaaaatttttttttaaattacagacgagatctcactctattgcccaggctggtctcagacttctgggctcaagtcattctcccgcctcggcctcccaaagtgctgggattacaggtgtgagccaccgtgcctggcctgtaattcccacctcaatgtttgtatcaaatgttcactctgaaaaacaaataaaaagcagtgccaggcacagtggctcacacctgtaatcccagcactttgggaggccgaggtgggaagatcacttgagccctggagtttgagaccagcctgaccaacatggcgaaatcccgtttctataaaaaatacaaaaattagctgggcatggtggtgcatgtctggggtccccaaaaaatatagaagcaatgacttatttaaaatccataccattcttatgaactacttacaaccaatgaaaagacttagaagttcatggaactcagaatctatcggaactgagattttagcaggcaaatgagygctagcttatctctcgtgtgcgcgtggtgagttaaatcccatggtattcacctaaagcagtaactaacaaagatttcagaaatcactaaaagaatgaaagtgcgcctttccaccgtaagttcaaaattcaacataaaagcccctgtcaaggcaatcatggaaatgctgtttgatgtgaactctggtgaagctgaggctcaccactgacaccggacggagcatgcgccactttctgtgtgtgaataaaatgggtgaggaaacaaaggcagctaggtttttgtgtttctttctgcaggccgctacgtcgaagacatctgcgtatacggaccaggagacctgccgtggctcattcagtcgccttctctgtttgccaacaaattcgaaccctcgacagacccgcttgtggttacctgcttagagcggcggcacagacttcaagtgctgaggcaggcagaagttcctatagagccacactggcattttcaacagcagagtcatttcmatatgagactgaaccgctagggagtgtttgctttcttactggtatcattctgtttccttgacttgaaacaagagaacattgaaccaaagaagtgggaaaatgattccttgatacaaactattcctaaaatgaattcagaaacatgctattgacaagactttactattgattacaggccacttttatagctttgggaaagaaatcacaagacaaaaaaactcaagctaccactggtgacatatagcaatgcacttagaaggccaaatgcttcagtaaaaagctgctgaaaacccaaattctccaaacacctggatccaggctcaagctggaataagaacgacacagcctgttttgaagacccagatactactgtgtatgagatactaagaaagaacagactcccagtgaaaatgaaaatatgcttatctgaaacagtcctcattggctgcaagcaatgtaaccctattctggcggtcctagaaaaataatgaagagtgtatttctctgggtaaaacagagctcatctggagtagaaaacacagcttgttaaaaagggtgccccaagtgtctgcggtcttgacatgtcgtctcctagcaccttctgtgatggtggacattccacagctgagctgtctaactgctcaccacagccacaggggctcctgggcattggaaacatggctggagcgactacaaaagtgaatctttatttttatttaatttttaaaaattaagttacctttatttatttatttatttgagacggagttttactcttgttgcccaggctggagtgcaatggcacgatctcggctcaccgcaatctctgcctcccaggttcaagccattctcctgccttagcctgccgactagctggaattacaggcatgcaccaccacgcctggctaatttttttgtatttttactagagacgcggtgtctccatgttggtcaggctgatctcgaactcccgacctcaggtgatccgcctgccttggcctcccaaagtgctgggatcacaggcgtgagccaccgcacccggccttaagttacctttaaataggcacatgtggctaattgtaccatgctgaacagcacagatctgagacatgaatggccatgattatctctattcacagatctgggtctcctcccttagaaagtccacgactttgctgctgccgctgctgttgtggagaactttatatatatcctccttctctaaaagagttcatacagcatcatatgaaactgaagtgcgtgacaattaaacagcacaacatacaagagatttaaagatgggaacacaggaaccagaggagaggaaattaaagaaacataattccaacgcaaagtgtaagcacctcagtaaatggaagcttcccacgcatagaaatgaagtcaagtcactgtgtgaaatagccctgggaaaacatcattgctagacagaaggaaaagggatttggaagacagatcccacaaatcaaacatcaaggaaccacagaaaagtaacacctttgtttaaacaaatctttcttccccttggatatctaatccaaggaaagcacatatggaaaatattaagactttcaaaaagaacacaagagccccatgacagcccaccaccaccttcccacacatttctacaggcaaacacggcgcccccaaaggcgatagctggctacatgctgacaggctgttcattcagaaagctcagattagccacgattatgtccccggtattttataactcaatagcaactgaatgtaaaccccattaaaggaacaataaaaaagcttacatctttcaagttacttaaaacataagcctgccttcacttcattccaatgtcaacccgtggtacacccagtcacataccgtgaagggggccctgtaaaagcatccgcccaccagcaccgttaggaggacatgggtgctcctgggtggggaagtgctcagaagaatggctgacacttttaacggatgagaaaatcgaggcacagggagatgatgggatgttcctgggaccacacagctgggaaagtggggctgggatttggaccaggcagctacactctgcagtgtgactactgagtcccaggtagctacatgaccttacgtcacacaaagaagcacaaattgaaacaaacacctgcccccaacaggcttaatgctataatgaagacatgtcctgaacaaatcatttcagtatggccaggcgtggtggctcatgcctgtaatcccagcactttggaaggctgaggcgggtggatcacgaggtcaggagtttcagaccagcctggccaatatggtgaaaccctgcctctactaaaaatacaaaaaaaaaaaaaaaaataaccaggcatggtggtgggcgcctgtagtcccagctactcgggtggctgaggcaggagaatcacttgaacctgggaggcagaggttatagtgagccaagattgcaccactgcaccccagcctgggcaacagagcaagactccatctaaaaaaaaaaatcatttcagtaacagcaggataaagcagaataataaaagtacactaaatgcatgtggaatgtaaaagcctgagactgggcttcagtggagagtggggacagcaatggaaaacaaggccaagagtcagagaggtggggaggccgagaggcagggaggcttgagaggcagggaggccgagaggcagggaggctgagacaggcagctgcgacaggccagggaggccaagggaaagcagcagcttccgtgagcatgagaacaagaagcctaggctcactctctccttatcagaccctcagtctgttgatgggtagagtgaaagaacaaaatgaacatgtgaaagtttaaggctgcctatgctgtgtcttatctgattccttgaggctaaatattcacaaagactataaagatggcagaaacctaagatactctgaagaaggccaaagcctgaaaaccagaatcagctgcactgaccacttctgacgacactccttttccctaacttaactttttctctttctactccaccccctccatgaaaagcaggtagacagtgtgagtatatatatttttgacttctaactttaaaacatccacacaccccattcacctatctacaaagcctacataaatgaagccacagaggtagcaagtccaatgctacggatcacaactccagtactctacattggcactttttttttttgagacagagtctagctctgtcgcccaggctggagtgcagtggcgtgatcttggctcactgcaacttccacctcccaggttcaagcaattctcctgcctcagtctcctaagtagttcggactacaggcatgcaccaccaagcccagctaatttttgtatttttagtagagacggggtttcattatgttggccaggctgttctcgaactcctgacctcaagtgatccaaccacctcagcctcccaaagtgttgagattacaggcgtgagccaccatgtctggccccacgctctatgattttattttctaaattgtgtattatgggttgaattatgcccccctgcaaaatccatatgttgaagtccaagccctagtacctcaaaatgtgaccttattgggaaacacagtcaatgcagatgtaattagttaagatgaggccattaagttgggccctaatccagtaccgggactggtgtcctaataagggaaaatgtggacacaaagacagacatgatagagggaagatgatgtgaacagggcgaaggccgtctagaagccaatgagaggcctggaccagatccttccctcagaagaaactaaccctgatgacaccttgattttggacgttagtctccagaactataagacaatgactttccggtaagtcatccggcttgggtacttaattacagcagccccaacaaactagcacagagtattcaacacagttctgcaaaggcaactctgatgtacagtataaaagtaaaaataattcattatctcgttcattctttgttggcaacagatgtatctttaagacaatttcctgaggtattcctgaatttcaaccagtgtcctgtcataactgcagaaagtcgcaacagccaaggtggcctccacgaggagccgggaggagcctacgctcgctcctgttcgtcacctggtctctactgtcccttgtgcaatcctgacgtggctctgttcctctttcctcctgcttccttcccttctcttgaagtgcaaggtacagactgttgaaagcttactagctttcagtaaaacttcccaagcaccaacgatataatctcagagttcccttgtaacgctgtatttccatgcaacagaatcagcttctctgtgaagctcggcagacagtgaggttttactgcatacgtgtcatcayggttattagtatgattgttttaggccaaccaacgcaaaggacaactgtgcacccatctaacagatgggtactattatgggcgtaagaaaaaactggattgctttagatcagtaggtcccccaaacctggtgacccattaaaatgattctgagaactcttaagaactagaactcctgctcctccttctggcattcgaaggtttccccaatccagtccgactcacacctcggcctctctccctgctcctgtaccccaccccacagtcctgacaggaccaggcctcgatcacacctgccactcatctcagtatggctgcccggctgcttccgccccatgagcactgctgctgcctttctttcccccactaaccaatcacagtcccagcaggacttacaacagtgttttgcaaacttcagccattcccctgccaactgtactgtcaatatcttaatatttttatttaaatctacccattgtttctgcttaattttaactgctaactttattttttatttatttatttatttttttgagatggagtctcactctgtcacccaggctggaatgcagtggcacaatcttgggtcactgtaacctccagctcccaggttcaagcaattctcctgcctcagcctcccgagcagccaggattacaggcgcgtgccaccacacccagctaatttttgtatttttaggagagacagggttttactatgttggccaggctggtcttgaactcctgacctcaggtgatccacccgccttggcctcccaaagtgctgggattacaggcatgagccactgtgcccaacctaacagttaactttatattcctaggctaaatatagagaaacagtactctttgccataaatatcaagttaccataaaaatgcagagaataccaaacagttttgctagatcctgcctgccaaagctctgagcttaaagtctactttcttaggcagttaagagagtgttacaaacgtacgaagattaaagggagactttctcctgaaagcaagcagaaggtctgaaggacagcaaaatgggcgtcactgtcctgccagacaacgccttacagagatacccagtacctggctgtgcgcctccccagagcagcaccgctaccaccagcaatctctccatccccgggagtgcaaccaataaccatgctcttcctttgaggcccagaacaaatgcccctccctttataaagccatttcttaccagtagacaaaaaaaagttctctggccccttagtgccaatatctttaccatctgtttggtacctggcctcaaaaagcaaaatagagtgtgatgtctcacataacatgattcctgcaggactgcaatctccgtgagtgcaggaaccatgtcatccaaatcttattttcccttggaatctatgccatcatcttaatacgggagccacaataaatacttctggctgaatatcaaccaattcccaaatgttttatttgaatttcttttcttaaaagaaagcttaataagacagactcctcattctatgaaggctttattcatagtcaccccaaactggacataactcaccgcccccactgacctcttccccactcacctctgcctgcctccgggcctaggtaacgggagccacccagtcctcctccacgtctaggatttttagaacaaaattaatgcacatcccatccggcttacagctgccttctggcttcctgctgctcttcgaataacatccataagccccagtgtggcccccaggccttgcatgagatgacccctgcctaactctttaatctcatctactcccctcaccagccctccactctcacactttctgttcactgaactcgcaaagtcctctgtcacttctgagcttttgcacatgctgttcctgctgccgaagaggctgctactcaggctgtgcacagctggctccctcgtgcccttcgggtctcagctcaaacctccagatatgcctctgccgaccaccactacgccagcctctctccctccatcacatggcctcatgtgtttc

SEQ ID NO: 95843 - DNA, 51463 bp, Homo sapiens
  misc_feature (1)...(51463): n = A,T,C or G
tcataacaaattcaaaatacataaagcaaacgtgaaagaactaaagggagaaatagacaaatccacagtcgtggttagatactttaacttcttctcttagttactgatagaactagataaaaaattagtaatgatcatgaaagttgtcagaatctaagtggaattacttatgtcaaactctaacaaaaataaataaataaggctgggaggctgagaagcagggcggtgtgtgggggggtgttgcacacatatctatgataagaacacgattacaaagactctctgaagagctcttacccacccatgcctgtaagaagaacttttgtcaaagacttcccaaactgctacatgaatcacaatgatagctagccagatgtacaacaacacctgcctgacacactgtcttcactaatgaactggcttcaactcctgtgataagcccctgtaaccaatattctctgtttcaaggcaaattatgtgtccttctccctgttgcctttaaaagcttccccttgcctcagcctcttcagttatgcctatggtcccaagagccctatatcctggatttgcaagtcccctgcacatctcaaataaactcaatatctctggagaatctccctctgtctgttatttgggttgaagtaatacagaagatctgaacaacactatcaaccaccttggtctaattgacatgtataaaacactacatacgataactggataatacacaatttttaagtacacatggagtgttcgccaagatataccatatgttgagtcataaacaagtcaataaatttcaaaaggctttctcagatcacacaggaattaaactagaaagcaacaattaaaataataggatatgttaaaaagccctaaatatttggaaattaaataacacttttctcgacaaggagtaagtcaaagaagaaatcataaagaaaattagaaagtactttgaactaaatgaaaatgaaaacaatgtatcaaaaatttgtggatttaactaaagcagtaagtagaaggaaatctataatttcaaatgtttgtcttagaagaaaggcttataaattttcatattgagaagctaaaaaagaagagcaaattaaacccagagtaagtaaaaaggaaaacattataaagataaaagtggaaatcaatggaatagaaaatagacaaaataatagagaacattaacaaacccaaaacttttatgtttaacaaaattgataaaattggtaagcttttagcaagactaatcaagaaaagagagggagagaaaaaaactaattactggtatcaggaatgaaagaggagatttcattccagatcttatacatatattcaaataatactactggaatattatgaacaactttaaaacaataaatctgataacttatatgaaatggccagattccctgaaaaacaaaacttaccaaaagtggcaaaagatgaaatagaaagcatggatggctctgcaactgcaaaaaaacttttccacaaagaaaactccagaattcactggtgaattctatcaaatggttatggaagaaatgataacaatcttacaaatattgaaatttcagaaaatagagaagaaagaaactctgattttataaagccaggccaaaacctggcaaagatacaagaaaagaaaacaatacactgattgcctgtatgttcatttttcatgaacatacaggcaaaaatctttatcaagatgttagtaaataaaatccagcagaatataagaaagacaaaaccaagttgaatttgttagcattacactaaatggagaaacattgaacacttttccctctaatatcaggaacaaggcaagatgttcattcactgcttctattcaatattgtgcaagatgacctagactacgcaaccacgcaagtaaaagaaaaaggcataaatattggaaagaaagaagtaaaactgattctatttacaaagtatatgcatattaatacagaaaatcctaaggaatcggccgggcgcggtggctcacgcctgtaatcccagcactttgggaggccgaggcgggtggatcatgaggtcaggagatcgagaccatcctggctaacaaggtgaaaccccgtctctactaaaaatacaaaaaattagccgggcgcggtggcgggcgcctgtagtcccagctactcgggaggctgaggcaggagaatggcgtgaacccgggaagcggagcttgcagtgagccgagattgcgccactgcagtccgcagtccggcctgggcgacagagcgagactccgtctcaaaaaaaaaaaaaaaaaaaaagaaaatcctaaggaatctacaacccccgcccctacaaaacaaataatagcactaataagtgaaagtctcaatgtcactatacaaaatcaattatatttctctacattaacagcaaatcaatggaaaataaaataacattcacaagactcaaagaataaaatacttaggaatatatttatcaaaatgcattcagtgctttaaactatgaattctccccaaattaaactacaggttcacaattccagcaggtatttttacaaagttgataagtcaattctaaaatttatatagaaatagaaagaacctggaatagaaaaacaattttgaaaaagaagaaagggtagacaatatacattatttgacttcaggaattatcctcaagcaatagtcatcaaggaagtgtgatactagcataaagattgatagataaatggatcattagaacagaatagagaccccagatataggtccaccttatatggtgaacttatttttgacaaaggcactagagctgatcaatggcagtaattttttgtaagccctacttttttccaacaaatgatgctgtagcaactggatatctatatgggaagaatgaactttgactcttacctaaaactatacacaaaagttaattcaagatgcatcatagacctaaacataaaactactaaaattttggacaaaaatatgggtgaatatctgagagtaggcaaagattttttagaacccagaaaaaaaacaaattgataaattagacttcatcaaaattaaaaatttctgcttatcaaaaccatcattaacaaacaggcaagccacagactggaagaaaatatttatgaaacatgtacctagcaaaggactgtatccagcatatctaaatctcctataattcaatattaaaaagcaaagacaaaaaatgtggatgtttcacaaaagaagaggtacaaatgaccactaagcacatgaaaacacaatcaactctattaatcaccaggaaaatgcatacaagtcacaatgagatacaactattagaatagctaaaatctggaaggccggcaacatcaaatgttaacaaggatgtggagcaactagaactcttatatattgctcttaagaacataaaataatacgaccacattggaaaaacttgtgacaatctaataaaattaaatatgcatctattgtttgactcagtaattccgcacctagatatttacccaagagaaatgaaaacatatagctacaaaaaaagatgtatgagaatgttcacagcagcattattcataatggtctacaatatgaaacaacccaaatgtctatcaactagtgaataaattaataaattatagtatattcacacaatgggatacttcagagcaaaaaagggcaagtttctgatatgtgaaacaatatggattaatctctcacacattatggtcaattaaagacatcagacacagagtacatattacattatttcatttatacaacagtctagatctaagaggaaaataaatgagaatagtgatcgcctggttgtggagggtgggatgaccgggatgacatgcaagggaactttgtggagtcaggggaaaatgttctttatcttgcttggtgttggggttacaaaaggatattgctttgtcgaaacccattgaactatacatttttgttcattttaatgtatgcaaaatttatttccctcaaagaaatgaactttaataaagcaagaaaaatatatgatcatacatacacaatactagggcctcttgcagggcacttaaagagcccaacagagaaaggggctaaactcacttgaagcttcattagctatgtagaaaatctgcctctgcccccagctcacattctggcccaacactcacttagttgtgtgaccatggacaagctgtttgatatctcagtcccttgaatcccacatgtgaaaattctgaataactatagaacctatctcactaaattggtgaataaattccatgagataaattagaactaactggtacatagtgagtgctcaacaaacataaactattatcattattgtgcagacacagttttcaaaagaaaactgtttgggaaattcttccaagggccatgaagagcctactgaagtgtcctgagaagagaagggacacagtcagatttgcctttcagaaataatgactgggccgagtgcagtggctcacacctgtaatcccagcactttggaaggctgaggcgggcggatcacgaggtcaggagttcgagaccagcatgaccaacatggtgaaacctcgtctctactaaaaataaaaaaattagctgggtgtggtggcgcacgcctgtaatcccagctactcaggaggctgaggcaggagaatcgcctgaacccgggaggcggaggttgcagtgagccaagatcacgccactgcactccagcctgggtgaaagagcgagactccgtctggaaaaaaaaagaaaaagaaaaaagaaagaaagaatgactgaagcagcagtggggaggatgaattggtcggggaggagggaagaacggatttggagtcctttcaggactgtcctaacatgaaaatggatgagacattattgatctaaggaattttttagaaataaaatagttttattcaaaggatatagaatttcaacattttaataaaaatctaaataaaaataaaagtaaaacttaaaatgatttttcacatttaaagatattaaaataaattcaaaattgcctagtaaaataaaagccaaataaattataattaatatcaaatcttgaaataaaagtgtttaaaaatataattgttcaatattgcagaaggttcttaagcaacccaccctgctcatgttgaattgtaagtacttctccagaactgcacactggaacgggaagagaaataacatggactttcacaccattaggaaaggagacttcattatactgagcccgtctactcctgcacactcctggggtgggattgtgggtcacagggagacgtacgtgcatactgccgaagagctcccaagtggctggctgcaccagttaacactcccctgagcagtgtaggggagtctcagagggtcacttggcattttccatcattttcattttagccatttttgcaggtgtgcgcaatgctgtttttataaccaacacatcatttttctcttcctttcctggagggggaacccagcttttctaggccctccaccctttgggcaggaggaactgggtgtgtggggcggggggaagccatctctgggtggttggtcagctggggcctaaccacaggaggcagatagactgaggctatgccaagcagaaagacttatcaggcacctcttgcctttcctcatctctgccggttcaaatcctgctcgccccgcaagggcagattggaatttaccttctccagaaagcctggggtgactctatcccctcactcctcctcccccgttcgccagcttttgtcttgacatcggcggaccaagaatgtgtgactctgggcaaatcattaacctctctgggcctatttccttatctggggaacatctgcacttgagcaacagaagtctaagatcccyatctgatttgatgttttgcgacccttttaaggcgcarggcgcgaaagaacagaaacagaagtgtccgttcaagtaggtcggccggggtgtcactcgtataaaaacctatgctttgaaggttctcgtgtrtctcggcctgcaggtctcgctcagagctgtgtccctgaacatccaccctgctggggtggcttgacgcacttctgtgcaaatctgttcgctcrcaaccctrcctacctctctyccgaaccggagaaaaccttcggcggggtccttccgggttttgtgtcgaatctgcggcggcgacccggcgccgcgtcacgcggtggtgaatgtgcggcagcacgcgcgccgcgtcgtttacgcggcgatttcatcatgctccgagccgggcggcgcgcgccgcttccgtcgccaccctctctggacagcccagggccgcasgctcatgccctctcygcgtccagtgctgcttagaggtgctcgcgccgctctgctgctgctgctgccgccccggctcttagcccgaccctcgctcctsctccgccggtccctcagcgcggcctcctgcsccccgatctccttgcccgccgccgcctcccggagcagcatggacggcgcgggggctgaggaggtgctggcacctctgaggctagcagtgcgccagcaggtacnggtgttttgcgctctccgctaagcctccggctctcctcccagggccttcttctggtcatccttccctcctccccggggaactgtcctcctcttcggttacccctttctttcccttcatcctctggcgtcttcttcgcctcccccactttggtcccaagtcccccgtgcgtcagccacctcctctcccgcggacctccgtcctcctctctttttggatgactccctggaacccctccgacttcctgcgtccctctccggctccgttctcccttccccattctgtcacagcccgcgtctcctctatttccagtggggctgggatctgtgaccctttggttgtcctcgcctcctaactgaataaccttaacttcagttttccaggctctgctgtactctttgtgcaccctgggtggaaagcctcctaattctttcagtggtcaatgatgagccgaaaaactgccggttctttcgtcttacggccaggccctttaatctttaggatgctttgatagtgtttcccccttaacatcttccttcattcagtgcttagtttagcggaatgattggctgagaaaatagaattgaaatgtggatgtggggaggtgtcgaacttttctattaatgctgtgaactcatcatcctttgctcttgtcatcttttctggcttctgaaaaggccgtttggaaccagtgagccctcagatcgtaaacctgggaaactaagtgttgcggagtgaagtcagccatccttagtatggaatattttgacatttgattttcccgaaggtgagggaaggtttcatgggctgaaggacttggtgatttaatatagacctccttttcctagggcactgccatagagtttagaatttagagatatcaaggaaaagattatttcagatgattcccatatgcaattagggagagccagagcttgcagtaggaccccggagatcatgacttagtagtaaacaccaaacgggtttctcctgcatgggcgcctgatgcaataatttgccttagctacagagggtggaaccctatctcggaaataattcattggggcatagctgccgcaaattcagccactttgccatctgtcctcttcgctggtttgagcctgaccgattttaataaatagcctttcattttgaaatatcaccacgggcttaactttttwcttcatgattggtgtcagaacaccgattgcatattctgtctccctccacccaccttccactccacaaataaaattaggtgtggttcctttgtcttttcttaacttgccattttaaaaaatatccttccctttagaaggaagcatacaactaatttggagaaaaaaaaaaaccaccacacccaaacccctccctctgccacgttagcctggaactgcagtgaaaatcatccatcggtagttaagacaggatctagttaactaaagtaaactttgatcgcggcagctttccgatgctactaactactgtcttgtgtattgtttatgttgtcttgattattgttttgtactttaagatattttccgaatatacgagttagttgatttaagttagtttggatatttttttctaattttccaagaacacacatatatcagttagttaattgtgtgaattactgagtcctatgtcagctgaaaaataatttaaagatgatctaattttacccattttttgtatatggggaaatgagacacactgtcacccctatccattttggataactccattgtgaagtgcaattgaaaacctttccggagtgggatttttacttaatgactggtcttgttagtagcacatgtttcatagaaatttgttaatctggaaaatgaatgaagtgagtttgtcactttaagaaaacaacggttagtatttgtggccaataataaaattcaaactttggggaaattttagaatttgggaagactcgtatcttttgctgtgagcttggcagcttcacagtccttaaagatatctgtgatgagatgagtggtgatattaacaaacgtggatttttttttgatagtatttggataatctgcgtaactcagtgaaccartgttttccaggtgaccaatgcatgatgttatgaaatcaggtattggtgaaagagccattcaaagcttaagatacattaatagatttattctgacagtacaaaaaattcattgctatagtttctgagttagaaataaccttgaagaagctaccacttgtcagagttttgaggtagtatcaaagaatatccacaattatccgaaacggcttttaaaattatttttccttttccacctacatatgtctttcttcatatactttacccagaacgtcatattacaaaagaagcagactttccacattggtcttttaggatttttcacagattaaggttaccaaaatagtaagtgccaaactcaaaatttaaaaacccatgaggaaacaagccaccttgagtgagacttaggggaaatgataatagaattagatcctccaaaagtattagaataatcacatatttttaaaatgcttaagataatttttaaaataaaagaagtactcaaaaacatgagcaaagaacaagagactaccaaaaacaatcacacagtgtgaaaatgaagcacatattgtatggaaatggatcactgaaattagaaactctgttgggtgcccaagggctatatcaatttaacaactttaattactcagctgaaagtttttcatcctatataggtaatattttgtttgtttactcagatgacctattccaccatattactataaatatggaattagtataagttgttggaagttaataaaataattcagaaatattagcaaggaaaaaattccaactgtaaagagaaaggcaaaggaagatgagccagcagtgactgagaagaatggtcagagaagtgggaggaaaactgaataatgtttttatttttttttgtaagcgagaggagagagatttaagaaggtggtcaatttattggttcttctgtgttctcagtacaaatcttgctctttcctactttttaatcaatgcttttgtctcctcctttttcacccctctatacccaaaggaaaaaattcaccatgtgagcagttatttgttaacttgcccgtgtgttcttctagattattaaatgaagagggcagagaccttgattcataatgatcactcacataataaacatttgaattgcatcattctttttttttttttttttttttttcattttgagacggagtctcactttgtcacccaggctggagtgtagtagcatgatcttagctcagtgcaacctccgccttccgggttcaagtgattctcctgcctcagcctcccaagtggctgggattacaggtgcccaccaccacggccggctaatttttgtattttcagtagcgatggtgtatcaccatgttggccaggatggtctgaaactcctgatctcagatggtraggagggcctttcaaagtgctggtattacaggcgtgagccaccacgcttggcctgaattgcatcattcttacatagactttttaaaaggcacgcttaaaaacacattcctaacatttcttaacttctgaaaccaatcctgaatataaattctctttcttggctagggagatcttgtgcgaaaactcaaagaagataaagcaccccaagtagacgtagacaaagcagtggctgagctcaaagcccgcaagagggttctggaagcaaaggtgagtcctgggatgctaaaataggaacataagtaggtataggattgttcatctttaatttctttggatgggagagacctagaaaagtttctgaacaagtatcatttggtttatctgtttatccataatgccgccttctcctttccctctacctggtagactcctcatcctttcaaaatgcaactcaaaatgtcaactttttaataaagccttcctgaccctgcaaatgctggactcaatacgctatatgaatttccakggaaaggattgtgctcttctttacgacttctcttatgcctgaaaataatgatttttgtttgtttgtttgttttaaggaaaaggtctgtttatttgatacctgctcccagacctttcaaacaatagatctcccatcaccaaacttaagttgttttggggttttaaagtaaccattttgctatagcaatccactgacaattcaaatattgctttatattgcttatcagtatctacatcaaagtaaacttagtcttgttttttttttgagatggagtctcgccctgttgcccaggctggagtgcaatggtgcgatctcagctcactgcaacctctgcctcccgggttcaagtgattctcctgcctcagcctcccaagtagctgggattacaggtgcccaccaccaagcccagctaatttttgtatttttagtagagacagtgttttgccatgttggccaggctgggcttgaactcctgacctcaggtgatccacccacttcggcctcccaaagtactgggattacaggtgtgagccaccgcacctggtcaagcttagtcttgtaatcttggaaatgatcatatattttcctaaatgattaagtaaagatatcttttatattactcaaagggaaaaaaagacctatggcttctattgtttttaacctatcaaaatcttgtctgtttgataaattttatatttaattctggtgaggaataaactaaattcagatatataagttcagattcccacccacccctccactcactcactttttatttaatctctaacaggagctggcgttacagcccaaagatgatattgtagaccgagcaaaaatggaagataccctgaagaggaggtttttctatgatcaagcttttgctatttatggaggtaagggattaatgacaaaaagaactattgtgttgttagtggctctaatattatacttaaatcaagaacatggcttgcctgttggtatccacttgtatcaggccacaaagcagaggatggatgttttgcttttgtttgcttggagtcaccatttggtgtgatacctgttatttttstccactgcatttattcctggacagcactttttttgattaggatgtagggaattgttggaggcccatgtatgtatttgatgtgtctgtgtactcatgtactctttttaaaatgcaatggagactgaagagtaacagagggccattgtagtactggctaactatactatgccccttcacacaggggcagtgataaaacagtccttagattattctttatggtcatctgccaggagaaaacattcttcccagggatgtagataaatcactgtgaatgccatatgaaggtatataggcaaatacaattcactgatgaaatgtaaaactatatttttcatagtcaacggattattacaacaacattagacatatagtactttgccactgaaagttgacttgagtttggctaagtggatctgtaaatgtttacccttttgaggttaaatagtgcctcaaatacccaggaaaaaattagagaattggatgctaaaattatagatcattgttatcagatgtkgtgagaaattattttgtaatttttacggcagaaaactgtaatctgctttttcattctgttctctaagggggaacttttgttgtagattttgggctagtcctacttgaaattacaaatatagaattagtaaatggcgtaagagcttttttattttacttccatcagctagctgaaagtaagrttcttcagtattgagggatttgcattgttgacttgaatacacttttagggagtataggtatcagtttctcatgtctccttgccttcatttgttcagagtaacaaggtaaagtatgtgttttcctcwcatattctataggtgttagtggtctgtatgactttgggccagttggctgtgctttgaagaacaatattattcagacctggaggcagcactttatccaagaggaacagatcctggagatcgattgcaccatgctcacccctgagccagttttaaagtgagatcttactttggagtgggggtatcctactttaaataaaataacttattaaattatttaatatacttatctaaataacttcctgattataaagaactactcatttcatgtagaaaatctgaaaaatatggaaaagcaaagaaatgtataccttctgctcacagatagcyatgttaagatgattgtgtttgtccttcctgttttttctgtacgtccctatgtatttcagtgttagcagtacactgcttattttcatgtaatattgatgaacatatactcatatcattaactattcatctaaagcatttttaatgatagcatagtattctgttttatggaagtgccataatatgttagtttgtgccatattgaaagcattaaagtgtttctcatttttgactgcaccgaatatcttgatagatggatttttgggtatatccttgattatttccttaatacaagttctgagcaaaggtatacttgtagagattttcagttaaatactatttgttttaaagtttcaatgcagaaacttagattattcctaccaacgttattgaaagtagggcagaatttcctttttttgtgtgtgtgagatggagtcttgctctgtcgcccaagctggaatgcagtggcttgatctcggctcactgcaagctctgcctcccaggttcacgccattctcctgcctcagcctcccaagtagctgggactacaggcacccaccaccacgtctggctaattttttttttgtatttttagtacagacggggtttcaccatgttagccagggtggtctcgatctcctgacctcgtgatccgcccgcctcggcctcccaaagtagggcagaatttcagaatgtgaaactgaaaggaattcttttatttatttatttattttttgagatggagtctcgctctgtcccccaggctggagtgcagtggggcgatctctgctcactgcaagctccgcctctcgggttcacgccattctcttgcctcagcctccagagcagctgggactacaggcacctgccaccgtgcctggctaatttttttgtatttttagtagagacggggtttcaccatggtctcgatctcctgacctcgtgatccgcctgcctcggcctcccaaagtgctgggattacaggcgtgagccactgcgcccggcctgaaagaggaattcttgccattttgtaactcgtcattattcatttaaggttgactggtggagagctaatttttactattggcatccgttaggttctcttaataatttcagccartgaagaggaggaattctgaatgatggctctataagatcaggactacctatcattttagctacttgttccaccaataggaactttgtagagataataccaatgtcagtacaggtttcagtggcagaaaacacttcccttaaggttcaatgtctatactgagctgccatgaattcttaactagtcaaattcccagtgattttggcctttgcttagatcactaataataatggcataggcatggattaattgatcctgaagaatagtacagactttatgacaacttgtagaaaagaattgtctttttattgtctagttaatgtcttctttcttatgggaaggaagaatgtgggagagggtgagaaatagatttgaggaagaattttctctggcatncattactgtcatggatacatcattactatagatatgggagcttccatctttgagatggatataaatattgatggggaattatcttataaggtaatatctatgtgtaatttgtatgagaatgacaaattgggttggcatttgttaatttaggacctctggccatgtagacaaatttgctgacttcatggtgaaagacgtaaaaaatggagaatgttttcgtgctgaccatctattaaaaggtgaggttcttcatctccttcaggtaggattgatcaaaataaaaggtttaaactttctctcagatgtctttcattaaattttttattgaggcataacattcaaagagcaaagtgcacagatcttaagtatatagatcaagtcctttattttttaaaaaagttatatgtagataattagttatatacagataatttttctaattagcaaatgaatcaagacaataccatgactgctgttgtaaaatcaactgtgggattcatgtaaattaagaactttatgcttggatttactttttaattgtctagcattgaaactgaaaagtgcattgtnctttttcccattgattgatatatgtcaacactgttcttacagctcatttacagaaattgatgtctgataagaagtgttctgtcgaaaagaaatcagaaatggaaagtgttttggcccaggtgagtactctagagatgttatcagagtaacctaggtggtcgctgtccttctttcagtgtttaatgactgttgcatttcccattatgctgaccctggccacattgtaatgaagcagaggttaattctgtcctgtatagcgtctctttttttgcatttttattttcttctctcttttgtgactaaccctttatttcagcccaaactaacaagtccgtgttaataggcattcaatttgtctgaccttggaaactacttttctggatttaatagctaaaaccacaggagtgactgatgatgggtagtgttcagcactggtgtggagacttcggggcagataacttgatgagcactttctcactggctacttgatctgcctctgcttggaccctgatttcatgctattattcttagaacctcatgagcaggtcctgacttttctgtccttgcttttctcagtttgcctataggcctaaagttttataatttgtataatatttaagctgacaaattttagagaagacaaaaaagagaccacagagataatttattctgacctttyaccaattgcaggaatactttctatattagaagtagttcttatccttttgttgggtcacagaccaccctaagaatgtgatcaaaactgcacgtctccctgggaagatgcatgtgctcatgtatatatgttgctggtgtctcacctcatctgttggctattccgtttaggcaaagtacatttctccaacaccatgtttagtcatgaggtctactgaggctcacctcttaaattttatttacttccttgggcaaaaaacaaaaaaccaatactgtgattatacctattttctttacaccgatctctctctctctctctgcctgaatatagaactccctaatatgttgtttttcatgggaattactggatacttttccactgttgtcctaattttttttttagcatgctttttttctctgtgatagttaactttccaacatagctaaaataatttctccttcttcatttacattgaaaactttcttaatttggctgttgaatcatctgctgatttattttgatacttgtggagtgtaattttatcccttgcttgaagctcattgttttagtaattactcatggtttagaaaattatttcttacattttgatactgttgaagccacacgttcatctcattttcttatccaaaggcatgccctttattagaaaaaatggaaaatgcctctaagtatccctaaaattttccattcagaattttagatttactgaggttttgtgtatatgtttttgatcttaacagtattattcatttccaagtacgttgtcagagttgggaagtaactagttgatttgacaagtcaatttattgtttgagcattggccttctctcttatttcagatctgtgttctaggagagcaatttgttttttgacttgccatatcagatgcatgtacagctgtcaatataatcttcaatgaaaagtaagggacccatgggaaatggtgtagcactcagaaatggccctggtggattcactggctgaaagcccatctgttgcttaagcacagagtagcgttttctgcaccttagtgtctgactccttttcagctttatgaagcatcattgtttctttaaaaggccctgattcaccttctgtggtaggaagacctctactcctattatgtggatttaacagctcagaacgaattcttttgtttctcttctctgtctgtttttgtggyccatctctggatgttccagttttaaaaaccatttttaacttgtttatgaaaaattcaaaacatacaaaattttatatgttaaataaaaacataataaacaattatgtacctatcaccctgcttcactgttagatttttttgtatctattcccctctcactttcctgacttctttcccctaattctttgtgtgtggtagggtggggacagagccccactctgtagcccaggctggagtggaggggcacgaacatggctcactgcagccaggacctcctgagctcaagaatcctcctgtctgggcctcccaaagtgctaggattacacatgtgagccatggtgcccagcctgaatttttttgaagcagatctcaaacattattttattatacctgtaaatttttcattatctatctctaaaagagaaaaatcctttaaaaataaaggatttaaaaaatccttttcaatcctcttaccttgggaaatgttaataatttaatatcatcaaatatttgatcagtgttcatgttttctaggctgtcttaaatgtttccagtttttaaaatttgaattgggatccagataaagtctatactttgtgataggttgatatgtttcttatatctcttccaatctgtatggccttccttcattcccttttccctccccgcattttcattaaaatttttttcaagaagctgagtcatttgttccttactgttttctactgtctggatttggctaattacgttattgtagtgaggttacacatgttcatctttttctctattagatttagaagcttgaccaggtatttttggcgagacatttggttaagtggtgttatggacttctgtccagagctacatagtacctggttagctcttctgtgggctgtggccattgatgtccattgtttagatgcattaactgatgaggggatttcaaaatggtgatttttgtcattgttattctttttttttttttttttttagctagactatttctatatgaaaaaactttctatcaactatttgatttaactgagacacgatttgtaaagaaaggtgagaataagtgcttcatccattctcccaccccttgtctttttaaacctgttttccattagttggttccctaacatccttcagaaatgcacgagttcctgcctgccttttcgttttttcctcctactgttgtgaactttagattcaaatatttgatattcagtcagttgcagttatcttattggtggttaaattgtccagtctttggtgactaggagttctctgctgagtccttttgacacagcccttgtagtctctgaaaacttcctttaatatgacaagatattgccatctcatcttatacatttcctgtcccagacttggaatcagacatttctccaaggagccctggtacttgrtacttattagtggggatggtattgatcactaattataaaccttgtcagtgatctgagctaggaagttgatattttttaaaagataaacttttcatgagttaatatagatacttaatagttaacttaaagttaggtttatagggtttttactatattaatcttaaatctctctcctttacccttaccaaaaatcgcagttctcagcaacaaaacataatgattgatgtgccttatctcccactgtatacgttaacagtctcagaatgacaataccaacaccaccatcagcaatatgaatgttgaaaacagttaaaaacacttttattgttcttttctttagggatatgccagcactgtgtagtcttacagtctgataactgtatttaaagtcacttggagtcattctctctgtgtggttatgccatcagctagatatgcagttagtccatatatttcattttattttcagtattcagggtttcctttttaaaaatttgttttataatcatatagcacaatagcaaagacttggaaccaacccaaaygtccatcaatgatagactggattaagaaaatgtggcacatatataccatggaatactatgcattcataaaaaaggatgagttcatgtcctttgtagggacatggatgaagctggaaacaattattctcagcaaactctgacaaggacagaaaaccaaacactgcatgttctcactcataggtgggaattgaacaatgagaacacatggacacagggtggggaacatcatacacctgggcctgtcggggggtgggaggctgggggagggatagcattaggagaaatacctaatgtaaatgacgagttgatgggtgcagcaaaccaacatggcacatgtatacttatgtatcaaacctgcatgttgtgcacatgtacactagaacttaaagtataataaaaaagttaaaatttgttttataatcatataaagcattttttatacctctaaaggcaaatctaaaaaacaaggtatatttagtctactatctttctcttccctttaccttccgtccttctgcttccctgcttcctgarcagtttttaacttaaaacaacttccttttttaaaaaaatagaatataarcaaagacatatagatatttgtatgccctcctttctagataaatggttgcattccatacacacttttctccattgtggttttcttcacataacaaaatatttcagagattggtccctcatagtatatagagattgcctccttccattttatagctacataattgggcattgtgtggatatattttacataaccagttgtccactgctggacatttaggttatttcccatctttaacattacagataatgctgcattgaataatcttgtgcttatatcttttcatgtttttgctattgtgtctttgggatagatgcctagaaatgggacaaaggataaatacaaatatagtaatgttagatattgccagattccctttcccaggggttttgctttctatctgtattggcagaatctttttcctcctgatttctttttaaattatgccttttattggaaaacactatatattcttgaattacctgggaaatagatgttcctcaggctctttaactttctactctagtaggaccagcttatatttatggtacccrtgtcttgaagttcactggaacagtttcctcattgatccagcctcttgggtaattgtataatgttattttgtggattcctcctagaaattctgtagaaatagagtctagaaggcttaatattttaaattgcacattcaaatctggaacatgttgttagtgtgagtgggttgcctttttatggagtggaaataccattggatttatgagggtagcaaatataattgctctttattgagtagttattatgtaccaggtcctgcctgtgctaaatactttacatgttttgtttaatcttcatcatattcctgcatagcaaggtagaagctgttctcccctgttcttagagaggttaggtaagaacttaatctttagtcacacaacccataagtggtgtagagttgggagatacgccaaggtctttctgaactcgaagcttcagttattatggccattaattgatttactgaattattttgtttctgttaggaaacttttaagttttaaatactgcttactattagatggtttgtcatagtcacttgaaattcttaaattggagggcatacatcattttacaggatttggcactgatgatcaatgtatagaatgtgcaatacactggaaaatgctgaggtgaataagatacagcttctgtcttctaggcgcttaatatctaatgggaaaggaaagttcaatgcacatttaattactccattgaggagagggtggtggctattaatagtatatttgcttgactggatctttaaaatacagagaaatgcagaaatgcaccttaaatatgttcagagtagtaaaattcagctttgaaaacttatttaggtaatttcagattcttgccaaccaataactattataattgaataagaggtattttgctttatctttcactttgaaacagtgactatatgagttttaggtcccagaaggatatttttttctctcttgataaatggaaagtgaataaattggttatggttttaatgtgggtgtcctgaaggttaggttaattgtgatgttcctgaattttgtgtgattgtagcagtggatggctagggttatatataatactttatatcttatgccttgttttctctgtcttttacactaatttctttatatgtcttttagcttgataactayggacagcaagaacttgcggatctttttgtgaactataatgtaaaatctcccattaytggaaatgatctatcccctccagtgtcttttaacttaatgttcaagactttcattgggcctggaggaaacatgcctgggtatgtatcacttattgtttacctgtttatgtaatgaagtttttaaaattgcttatattaaaaggtaaayatcaatgttatgaaggaaaaatttttaaaaagtgatatacagaagtacagatgaatgtattatggagawataatggcagaaataaatcttttaaaaaattctttctgaatataatttcttttttggcatatatgtatttttttggcataaaataaagtctctgatcactrtatcttctagttatagctgcatagggtagaagggacagttgaagaatggttttaaaagccgttgaacttattgctgaaggatattttagaaaccatttagtttagcatgctactgtccaacggaactttctgcagtgatggaaatgttctgtaatgtgtgttgtccagtatgattagctaccagccacatttggctcttgagcactcataatgggtccagttcttctgaggcactgaattttaaaatttatttcatcttaattgaaatttaaatagacatctgcctggtgtcctaccatattggacagcataggtatagcctgttgatttgaaagatgtggttttcatggataaagaatatctggttagtttacagtatgattcagaattggaatctttatcttctgattccttgtccactgtttaacagacttagccagtgttccatttcatagctttagatatttttctatgatagggtaagagagtaagtttttcctacatgagctagatagatcgtgtttcccagagtagggactgaagaataagaaaaattaattgtgacaaaatgtgttgcagttaattattctaatgagacatcaggttgatttggaatatttcatggaaagaggccagtggcaagcctttcattttggccatatgtacagagtcataaaatgagacataacctgtgacccagacattccatttctgggaattgatctaaggaaataattcagaaggaaaggaaattatacttagaagaagtatataaattgaaagtagaaataacctattcagtaatttgagagtggttaaacaaattatggtaaagtggattagtttgggataatattctgtcactattaaatgtgagaaatttgtgccattatttagaaaatgggaagtataaaataggtaatacatgattttatacatactaactgtaaatatatgtataaactttacttacatttggatgaaatctggaaagggccataaaaatcaaaagagttggtctgttaagtaagaagagggtacaattttagggtttttagcccttggttttaaagttattttagtaaaatacttattctgaagtaggccattgggagcgtttccttagtggatgttttgcacagaatatcttctaggaaattgagagggcagtggttatagtagtgtatttgcttgactatatctttaaaatacagagaaatgcggaagcctctggttgaaaatataaaatactgcagataataaaatgatttgaaaaacattgaaaattacctggcttggtgaggtgatagtgataagtgagtgctgatgttaaatgtgagcctatactgatttctttttagcccctcagttaagttttaatatgtgggttaacagggctaaacataggcatgggtattattttccaaaggacytaagattgtcatctgcctccatgtacatgatgacttagaagacatcaggggtttaaggggcactatgggagaggtggtgttttttgtttgtttgttttgagatggagtttcgctcttgttgcccaggctggagtgcaatggcgtgatctcggctcactgcaacctctgcctcccaggttcaagcgattctcttgcctcagcctcctgagtagctgggattacaggcatgtgccaccacgcctggctaattttgtgtttttagtagagacagggtttctccatgttggtcaggctgatctcgaactcccaacctcaggtgatccgcccacttcagcctcccaaagtgctgggattacaggtgtgagcgactgcgcgcggcctgaggtggtgtttttaaatttatttttatttctgctttttgagaagtggggttttgactcactggtgtaattaaatgaaatggcattgccaaagtagtactgccacactaattacttaatacattttctaatacgtgctatgaaaatgtttgctaccgaggaaaatatttctaaaacttcattttagggcctgttcaactttgttgtgaaaatggtatatttaggacttttaggatttgtatctagaatttcaggattgttggaaaacataatttctttctttgtaacagactgacttacttaaatttataggtacttgagaccagaaactgcacaggggattttcttgaatttcaaacgacttttggagttcaaccaaggaaagttgccttttgctgctgcccagattggaaattcttttagaaatgagatctcccctcgatctggactgatcagagtcaggtactgctcaggttactcttacaaattagtgaatgaccttggcattgcattgaaaatgaaagcttgctgttttgaarcaattctgcttcataatcctgattatgaatttatttttgttttctccaaaaatcatgttttacatttggaatctctaaatgtawtctccaggatgacaggcagttttgagtgacaaaagtgaacttgaagggaaaggaaggagggtggagactgtcttaagagtctcacctgctccaaaattacctttttccttgttcatcgtatattttgaggatggtaatatcttgattgtctaaaccaaggcaatactggcaatggtgatgtgtataaaagggtggggtcgggtgggggtagggtgaaagttgtggcaggaggattgttctagatatctagggcagacaacattgctgaagttggggtgaggatgtatcagtaaccaactggagttctggaaacaacctccgtccaggtatttggggggcctatatgacagaaaggccagcaagcaagcttaccctcatcactcacttggcctctattcaaatagcctacttttgtctgatctatccagggatgtgtgggaaggcatattggggctggtgagttctatatttctttagaaatttattatgactcagctgtttatgacttaagttttttgtgatttctatacgttattcctggtatcatctcttagagtaatacattccatataaaatacgaggtgtagctaaacataactttctaaggccccaaagtgttttcccagccccagcgcccacccatttcctgtcttctcttcttactcactgtaattacagacttgggtcataacatagcccagtcactgactctggatcaaagcatccacagcacctgcctcatcttgttagttcccatgatgccatctgggagaagatgcctatgttctgcgcaaactgtatctctaggccctacaggtttacggtttaggaaggagggacttacagaggaaagaatgtgcccaacttagagaaagttgggggaatgacccctctgagctttcatgtaaaaagaggaggtcatcagaaactttagccaggtatgatggcaatgacaaatttgtcagatttgagtctttgttttatttcccagtgtctgagtgtttttgtttttttgtttttcaccgtttcaatatctagcaagtatgccttcccaaactgaggaagctgcgtaaggctgaccttgtctgaagccagtgttacgaagagggtttacacagagtagctatgggaagattattgagaaggactgagaagtaaggcagtgtctggggcctgtgcagtaaaaaagtggtgagtagggaaaccagcttggaacttgggagtgatcccaggggttaactggtagaaaggctctggggcttctcaacagtggattctttggtcattttcacttcaaagtgtcatgtctgaattctggctagttttgttatgtcccttgcaagttcctgaccagaagtccactagttttttcatgagtcagcatcctcctggcttttgttccatggtaggactaggattggtttatttagtgttctgattcttcttgatggcagagttctctggtgattaatctttgcatagctgtatttccttttgtccttttgttagtttagaggtattagattgttcatatgaagatttttctaaaattttattttattttgattgacttatctgtcttcctagcctgtgtgtattttagttctctacagtttcaggtacagttgctgaactgagatacagttactcagaattctgatgattcctgcctcctatctatgagctgagattattgatgagtaaattttgtatgatttgtatgatttcaagtcacacagtgtggtgctttgatatgcttatacattgtgaaatgattaccacagtcaagctaattaacataattatcacctcacatagttactttttttttttttagtggtgagatctacttaacatctactctttgagcggatttcaggtatacagtgaatcattaactatagacacagtgctgagatttgtgacagaacagatggaaagactttggcagcagcattttggagattctaggcagggcccgtaatttatcctgtcccacattgtagatgttcagttgctgtcagcccaattataagctatgtgaggacaaacaccatgtttgtttctctcacatttatatgggcacagaagatgtttcctagttgttgaaagacaactaaaacataggtgcagcaggaccaaataagagacactattaaaaaataaaatttaaaaattaaacctcttggccgggcgcagtggctcacgcctgtaatcccagcactttgggaggcagaggcgggcggatcatgaggttcaggagattgaggccatcctggctaacacagtgaaaccctgcctctactaaaaatacaaaaaattagccgggcgtggtggcgggcgcctgtagtcccagctactcgggaggctgaggcaggagaatggcgtgaacccgggaggcggagcttgcagtgagccgagatcgcgccactgcactccagcctgggcgagcgagactccgtctcaaaaaaaaaaaaaaaaaaattaaacctcttttgcagtgtatttcatgtatttttaggatccatttaagcaattttacattactcgtaaaacatctgagataatcatggaagcacaccagaaaatgtgatttttcttgaaagaagagagattgattttgactcataaaattaacttgaaacacttctcccgcaaatagctactaaattgcattcagagaaatctctttgggaaaccattactatgtgcacttcatcgttaggtaattagcttgatgttagcttgttcaattcatgccttatatcctttgccttgaataacactttatttaagaagctcttgctccaaagaaaccaactgtatgatgccattatcagtcatttacttttttgtagcagtaaaaaagaagaaatcaaactgctatgaaagctaaagaaccatttcatttcgcttttaatttcccattctttgaaatgggatgaagaaacttcatttagtgtatacttataaagacttgctaatgctttaaggaaaaccattttatctgcatgtcactattcaatatcttatttcttatttttcatgtgatttttgcgtatgttttcctaatttaaaaaactatattaatctgcctttaacaagttattttcagttaaaagtaataatctttttggatgtagctggagggaaggaattaatacttcagagaagttagatcatgtttattttaaatagtgagtaataaaattttcattaatgtgtttaaaaataaccttcacatgtaccccataaatttgtacaaatataatacatcaaaaaaataaaaataacaactacccagacaaatttaattcaaaatttttttggccattcccttaggaaaccaactttctgtttagtgaaaaagaccactatagtatggagcctttatcactagaatgcagttgaaaatagaggccttgttttttgtttgtttgttttttgtagttaaatatgcaggtttwtcgcttacgtttttgctttcagagaattcacaatggcagaaattgagcactttgtagatcccagtgagaaagaccaccccaagttccagaatgtggcagaccttcacctttatttgtattcagcaaaagcccaggtcagcggacagtccgctcrgaaaatgcgcctgggagatgctgttgaacaggtaggattctggaggtaacttaacttagattgtgcctgttcagggtttgcagcaattagcaaattctatgtgttctgggtgacaagatattttattttggcagtcatttgcttttttacagtacttggttttgtacagaatttgttatacagtattattatagtaagagaaaaatcacctgaacatctcaatttgtgggccttggggctagcatgaaaaaaaatgtttagcagagcacttggaaaatagatcttggtttgcattgtgcctcaccaatctgactcaacagtatgtactactttgggggagacagcattggacccacagaaagcaagccatctgggtttcagactcttctgtattacccatagcagtggaataaggccttgcatataagcactttgtaaatatttgcctggagaagtgagtgcgtgaaaacttgccaacagtagctgctgtccactagtggaatgagttgcctcagggagcagtgagcttcctggccctgaaaatactcctggcaaggttggacgatagcttgtcagccactttgcagagaagacctctgcagtgtatggagatggggctagatgttttctaaggtccttgcaaacactaaaatgattacgtgtactctacggggttcacaaatttcagtgggtaaggatacattaaaatcccctcaacgtgtcattactttggttaattcagaggggaatgtctttgccattctttagtgtcaattatgaatattgtttttagtactgtagatttagaggtatgaggtactgggctgaatttttgctgacccagtaagtatgttggacagattttgaataactccattatcatcatcttgacattaacccattaaaaaataaccaagatctcattctgagtatttgaaattgttttgaaagcaagataaaatagtttgtgttgggtgtcaaatatttttcagtagagtgagtcaatggaaaccgatatcttggctttgaagagtattaaygtgtgttttcttttcttcctccatgcttgcttattggttggtttagggtgtgattaataacacagtattaggctatttcattggccgcatctacctctacctcacgaaggttggaatatctccagataaactccgcttccggcagcacatggagaatgagatggcccattatgcctgtgactgttgggatgcagaatccaaaacatcctacgtaagtggagtgctgtttaccatgtgattttcacattgttaacttagaagcacaggtaccaaatgaatttttgtgcactttatgtcacagaggaacraagggaaaagaaaagagatcttttcctgagcaaaacagaaraagcagttgcctcctgcctttttataagtgtcctaaggagctcgttgtagtcttagatagctgagagacagagttagtgtatgatgggacagtgcggatgtgtacactgctgtacagtgtattggcagcattactggcaatatcctggagtggatctaagrcacattggcctctccttcctggcaagagtcccagcaaacattggaaatggtggagaggttgaataaagaaagtcatagtgctcttagctcaatgagctatgtagtagctttggggaatatactagttgattctgatctctggcttaagaactaccttcctcaaatgttatgtatttaactcaaaattcacagacgatctccaggtaccctcctgcccctgtgccctgtcacccctccagcctccaccaccaaacatgaacatcagtattgaagyggagggacgaaaggcatttgcatataggagatgctgtctatattggtggcaggaggaaatgtggcatctaaaacaaggctgagagtcttttggcatttctcttattgggtgttagagaggcttcctcgcctacatagaaagagactttagtccaggggtcactggttccagtatacccttggttcagtttttacttttcagaatggctttctttttatggatttttaaaaattaaaaatcaaaattagtcatattttaaaaagtaatgactactttttttaaaacaaaaaggaaaaaataattctgaagactattatgtagaaaattaaacttccagttatatgcctctccccaggtgttttatgtctcttctctgtattgagcaaacattttctataaaggaccagatggtaaatatttttagctttatgagtctctgtcacataactttgttgttttttacagcttgtaaaaaacagcttttaaaaaatgtccaaactggctgggtgtggtggctcatgcttgtaatcctagcactttgggaggccgaggtgggaagattgcttgagctcagaaatttgagaccagcctgggcaacatagcaagaccctgtctctacaaaaaatacaaaaatyagccaggtgtgatagcacgcccctgtagtttcagctacttgggaggctgaggtgggaagatcacatgagcccgggaggttgaggctgtagtgagccatgattgcaccactgaactcaagcctgggtgacagagtgaggccctgtctcaaacaaacagacgaaaaaagatcatgcttagctccatggtcttgggtatgtctgccttctctagatgatttttctacgtgttctaacacatgcatgcataaatgcataataatatgcatatgtttataaatggctattaatgatgttgtttttaatatattctttttcccttgtggaattagaaagaattactgtaatctgttaggattttcttagcaagcttgcttgacatatgtcaaaatgataatagtaattatttttaggattatgggtgatcattaatttctttacactttttagattttctgggacttctttttattttcagatcaaaccaataaaatgtttttccttttgtatgagaaaagattattacttttctttttgtttcatacccagctccttctcttagtttgctctgattctgatttcagattaaaccagatgttgttcttgctgtctcagttaagtaatttgcttaagtctcacagccagtgagtggtgaggctgggatataaacctggctgtctgacaccagactcatgctcttaacagttatgctgtactgctttataaaccccactggatgcctgctcgtccttatctaagtgccattgtgagggttagggatcagaaaatggaaagtcactggaaaacagggctaaatgaaacaagaagctccagagtcccagaggctcttaaggagaggggagaactcccttagagagtttaatactttttgtgtactttatatatttttttaataaaaaaatttaccgttgcagttaatgccacaccaattctctttccatccagagaagtaaccactatcccaatgttgttattctcaggcacgtttttgtaattttacctttcagtacataaatgttagttgacatctgcagtaaattataaccaccaaactatatggttaagaacataagtatacttaaccagtcgacatgtatagggaatgtcagattgccaggttacatgtttttaggctttgttctttaattccttttgttgttgttttgtgttggagtttctgagctcatatgagttttatatttgcttgctttattacagacaccccatgtgataacatgtgcttggaaagcttagtagttttttctttttttctttttttttttttttttttgagacagagtcttactctgtcacccaggctggagtgcagtggtgcactctcagctcactgcagcctctgcctcctgggttcaagcgattctcctgcctcggcctcccaaatagctgggattacagatacatggcactgcacccagctaatttttgtattttcatgaagacaggatttctccgtgttagccaggctggtcttgaacttctgacctcaggtgatccacccgccttagcctcccaaagtgctgggattagagacacgaaccactgtgtctggccaagcttagtagttttgatggttgaatttccccaaactctttggatcaagggcaaaaaaaaaaatgaatcttcttgagaaggactaactaggtatctaccaaaataagctctttacaaactcttgttcttattgaaataacgggttcttaagagtttgtcatagttggggtttctataagaaagcaccacatacagagtggcttataaacaatggacattgatttctcaccgttctggaggctggaattgagagatcagggtgccagcatcgtctgatccttgtgagggccccattctcagtcgcatactgccaacttcttgttgtatcctcacatggtgaaagagggcaagagagctctctggggtcccaaattccagtgattagggctccatcctcatgacctaatcacctcccaaaggcacctcctcctaataccatcacattgggagttaggatttcaatatacgaattttgtcaaggacacaagcattcaattcattgcaggttctttgaaaataatttaaattttgctttttaaaagtatcttatgtgtgtatttataagaaagggaacctggcatcaatgtgatcataatgctcttatataattttattgtgtgacctgaactttacccactcttatactgagttttcttttgttcagtgaagaaagtgaattgaatccaaatgcccacatttatggccagctgaagtatgtgtttagtcagccatctgatatcaagttgtgagaacactaggtacttcatctaaagaatagtggtttctgccaaattcattttgatttctgttcacaaatttgaaccaaatttacaggctttgtctaggttcacatttaatttccataattaaattccagaatatgttagtttaccccacagactcagtataacaatataaatccatccagaaaggaagactactttgtgtacagtgtgaattatatatttttttctttctttttttttttttttttaagatagggtctcactgtgttgcccagattggtctcaaactcctggcctcaagtgatccttccacctcagcgtcccaagtacctgggattacaggcatgagccatcacacccagatcagtgtgaattatattttataggcttattagctgcctgatatatgaggctattcccatttcaaatatttatgaaatttgaatgaagattatatcatcgaattatcattgaatatatgaaaggtttataatctgcmtgcatttgtgaatgaacccaatataagtaataataagtaagtaatgtttttattgattatatctttttagggttggattgagattgttggatgtgctgatcgttcctgttatgacctctcctgtcatgcacgagccaccaaagtcccacttgtagctgagaaacctctgaaagaacccatatcctttctggtcactccaaaaactcaggattcacatgtgaacatcttgctaatgaataagtccaagtctttaccttgttctatggataaatggagatgttttagacactrtagtaacrcttgtttaaacctattattttacctatccctttgttcctttcctattctctgtacttgtagtctgacgtgtgcccactcaatgtttggcctttaaaagaagcatatttagaaaaatgctctgaatatctttcagaacgttaatagtttttctcagctgtttccaaaacgcacttcacacctgcacctacctacgtgctctttaaataaagggtacctggtgaaagctttttccattaaaagatgagtgccatttgatagtagctgaaataataatttagctcacttggtctgaaaatcagcaaaatagaaattttctttctttagtaggcagtgaagttatgagctgatttcttaggggtaggtcagtgacaggaaatagatcttgttttgagcattttagaaatacttaycagaagttcttatgctatgggttgggtcattgctgattagataatatctcttttttctcactgtaactggaaaagtttctattgatggtgttaattttggatgagagttgtctgaatgattttgtggacaggtgtttcatcttgccttaaaatcagcataaacaggatctggagtactgatagagagctggcatggttttaagttgatgattgattgttctcaggctcattttctgaaatactgaggcagtgctgtagttttggattccttgactacttcatacaaaacagtcaatgttgttcagtttgaacccagtaagggagcaattggtaaggcatataagaaggatgcaaaactggtgatggagtatcttgccatttgtgatgagtgctacattacagaaatggagatgctgctgaatgagaaagggtaagataycagatgtttactcttccatgggctccagtcagttgtgtcatctgccaggttctgaaaggatgagattaatttcttaagattttttgcaggtaagtactgtatcttggctgcatttaaaagactgtctttgccgagattttggcattatagcctgaaaaaagatttgaaatagaatatactttttttttttcctagtaactgtcttaaacaaagagacttgtccagccaggctgaggaaggaagggttagaaactacatctactatctctcaggtcacttctctctcctttttggaggtttagaatactctctgtaattgtttaagcatgaatataaacaatagagaaggccgggcacagtggctcatggctgtaatcccagcactttgggaggctgaggtgggcagatcacgaggtcaggagatcgagaccatcctggctaacacagtgaaaccccgtctctactaaaaatacaaaaaaattgtccgggcatggtggcgggcgcctgtagtcccagctactcaggaggctgaggcaggagaatggcgtgaacctgggaggcggagcttgcagtgagccaccatcgtgccactgcactccagcctgggcaacagagtgagactccgtctcaaaaaaaaaaaaacaaaaaaaaaaaatagagaaaagcctttaaagaaatacaacaaaatccagcactgaacagtgtaaaacttacaatatccagcaaacaataaaaattattatatatatgaaaaagcaggaaaatgagaagtaaagtcagtcaaaagaaacacccagaaaaaacaaacatgatgcagtaagtacataaggatgttaaagcacttattataaatatgcttcatgtactcaagggtgtaaaggaaaacattaacatgtgaggtgagaaatggaaaaatatatgtgtaatatggatataaacacatgttttttatatatataaacaacatgaaacatttagaggcaatatctcaaatgaaaatgtcactggatgggattaacagtagattaaacattacagaagaaaggtcattgaacttaaagacatagcaactatccaaaatgaagcatagaaaaaaatgagactgggaaaaagatgtccagtgggacaatatcaggcagtctaatgcatgtgtaattgagagtcctagagagggtgtatagaaaaaatattatacagtagctagaaaatttacaaatttgatgaaaacgctaaaactacagattcaagaagcttagccccaagcaggataaacacgaagatgaccacatgaagacccgtgagaatcaaatagctaaaaaccagggatgaagagaagaacctttaaagcagctagtggggaaaaagactcatcacataaaagcaaacaaagataagaatgattagaattcatatcaaaaactgcgcggatcacaatataatggaatgaaatcttttaaagtgctttaagacaaaattcctacacccagcaaaaatatctttcaaaaatgaagaggaagtactttaagaccaagcttgttcaacctgcggcctgcaggctgcatgtggcccaggatggcttttgatgctgcccaacacaaattcgtaaactttcaaaaaacattatgaggtttttttgcattttttttttcttagctcatcagctgtggttagtgttagtgtattttatgtgcaktccgagacagttctttctagtgtggcccagggaagccaaaagattgaacacctctgttttagacaatccggggctctgagagtgcattgccagcagacctccactatgagaattgttaaaggcacttcttcaggcagaagtatgaaagtttagatgtacccagaggacttgagagatctagaaatgataaatatgtgggtaaatagaaatggcattttctctgtcatctcttaatttctttaaaagataatggagtatttaaagtaatatggaatttataacatggaagtaaaatgtatgctatcagtagcacaaagggtgggagcaaagaattgggaatatactcttgtgaggtgtatacattatatgtgaaatggtgtaatattacttgaagataaactatgataagttaaaaaatggatagaatgaactctagagcaatcacctggaaaaaaaacacacacaaaaaaggggtgtaactaataaaccaatagtggagataaagtagaataagaaaaaatattccacaagaagatgggagaaaaggaaaaggaacaaagaacagatgggacaaagatgaactcttgcaagttgaagatacctgtttcagaaaaatttaaaaacatttctcgtcttccagaattaacatctatttatactaaaacaatatcaaatcccattaaaatggactaagttatattactagttaaatatcattatccataaacacagtttgctttattaattattctcaaataatggctgtctccttgtcaattacaactcttttttttttgagatggagtctcactctgtcacctaggctggagtgcagtggcgtgatctcagctcactgcaacctctgcttcccaggttcaagcaattctcctgcctcagcctcccgagtagctgggactacaggtgtgcaccaccacgcctagctaattttttgtatttttagtagagacggggtttcaccttgttgaccaggctggtcttgaactcctgacctcaggtgatccacctaccttgacctcccaaagtgctgggattacaggtgtgagccacctcgcctgacccaattgcaactcttttatagctgttaactatgatacacttagactgtgctcacagagagaatgcatgtgacactgtgtatgtaatggaaccttgaatgcatgcacacacagacttcagacagtatagtaaaaacggaagaattcagtgaacaccagtcagatgaggcatgagattatcacaggtggaaactagcaaaatacagttataacatatgccaactatccagcttctgagacaaccacatgagggctctctatcctagcactgaattgcttgggagggaggagaaatccaaatggatattcaaaatgtgaggaaatacctcctaagctgaaatacaggtattacatgaagctctttataaagatgaattcttataacctgaaactgaatgggcatatctcaggacacaaatacatggcagccagtgattttgagggggataatattttatattgccatatgaaacagaaacattaaacttcttttaaactgatcttcatcaacacaaatgtccaaatttattttgaaaatagtgtgggtattggattgtaaaattacttctgtaagatggcatgctggttcatttgtacatttgttgggacagtaatgagaacccttgtgtttttaccagcaggcctatttctgacaaagttgttattattctaaaactgaattttcaaaaagttgtttttggttttaccttgattcaaaaccaaaggaatttgtcattaagtcacttgtggagttttataaaactagtcaaaatttggtgtatgtcctcagagtactttttggtgccattgttagactaatgcttaatttggtgtttcttatgaaataatttaaatttgacatcacttattatatctggagagttgatcaagttataaaaagaaaaaacaacttagcaatctacaaaattcctttaaattaaggcacagggtgcctgtttgaactaatacaaaatgtgttttgtttcttcgtagggaattcacaattgaaactgaagggaaaacatttcagttaacaaaagacatgatcaatgtgaagagattccagaaaacactatatggtaaatttgtaaaaataataaacaaaaagtcactgctccttaaagcttttgttgttgtttgagacagggtcttgctctgtcacccaggctggagtgcagtggcacaacctctgcctccccggctcaagcgttcctccctcctgtctcagcctccgaattagctgggactacaggtgcaggctaccatatccaactaatttttgtattttttgtagagatgaggtttttgccatgttgcccaggctgatcttgaactcctaggctcaagcagtccacctgccttcrcgtcccaaagtgctgagattacaggcatgagtgaccacgcctggccctcattccctgtcttctttggcaaaataacttgttaaaaagtcatttaggggccgggcgtggtggcttacgcctgtaatcccagcactttgggaggccaaggcgggtagatcacgaggtcaggagttcaagatcaacctggccaacatggtgaaaccccgtctctactaaaaatacaaaaattagctaggcatggagacacgcacgtgtaatcccagctactcgggaggctgaggcaggagaatcccttgaacccgggaggtggaggttggagtgagccgagatcacgccattgcactccagcctgggcgacagtgcaagactccgtctcaaaaaaaaaaaaaaaagtaatttagaccagtgatgttgcatgcttttttaaaagttaagaagatgtttttttgtagaacaaattctgtgaattaggcaatgagtaatttggagcacgtatgaaggatgctgaagtttatttgtggctgaattgaaattcctggaaacggagtagtaatgggtgtttgagaagctactgccagtggaaagagtgagcatacctttccttttgttcttggcttgtcttgtagccaggcttcagtgagcagtgttaggagtaagcgggggcttctccatcacactctggggcttttccgtcacagtctggggctttatagccatgatcctggcagctggttcagagctgcacatcaccattactcagataccacagaaggatgggaggaaaatgccttgatcatgtttctaaagtattaactctttatcatagacaaacaggctctcttttcccatatgtgtgtgagttttggtaccaatgatctcatttcccaaaaaacataaactcttccaaagttatgaccagttatcttagacctggacattgcttagcagtgcttcttcctttccacataataagtaataattatcagtatatttcctgtgtataccacgggtgttgtcttacccacatgaagagctgtgagcccctgtaagatgtctttgatggagtgctgttctttgagcaaactctcccctaagggcgtcctgaccccagaaccttggtgatacaatgccagtaatttggttctgaacaagttcttatcaagataacaagctaaaaagttaaacaaatacaaaccatgtaatactttttgcrtgtaggaattgtttttgtgaattttgccagctgtgttagattttaaattctagcaaaatcttattaaaagccttagattttttatgctttctgggtagccgaggcaggtaatagagataaagtgtagctgctgctattcgtagtttgctgactggtgaaggaatattctagtacctcaggtttcatttttacacagtataaacagaatttggtgaaaggttttttcactccagctttctcttcaaaggcatgtttcctatcagcaaatagtttttaggtatgttctagtttctttgttctgatatacagagataaaaatccatctagaatagagatatttttagtgctaagaatttttttcttttcttttctttttttttttttgagatgaagtctcgcccttgccttccaggctggagtgcaatggcacgatcttggttcactgcaacctccgcctcctgggttcaagcaattctcctgcctcagcctccggagtagctgggattacacgcacctgccaccatacccagttaatttttgtatttttagtagagacggggtttcaccatgttggtcaggctggtctcgaactcctgacctcagatgatccacctacctcagcctcccaaaatgctgggattacaggtgtgagccaccgcagctggtgaattgtttagagagaatctgaaatgcattatgtggtatttgagagaatgttattgaatttctatctctttttcagtggaagaagttgttccgaatgtaattgaaccttccttcggcctgggtaggatcatgtatacrgtatttgaacatacattccatgtacgagaaggagatgaacagagaacagtaagttgttgtgtacagtgtgctgttatagtgtcagaaaataaaaattttctgaattacattgtgaagtacattaataagactctagaatggtcaattagttattactataatctagtgctattaacactcatctttgcttaagtatgtatagacaaaccagtttcctgtgttatcttatttgagctttaggttattctagaagctattgttttagttgcctggtgctctctattcttagactgaacctattactttggggaacaatctatattatgtcaatggaaggaatggtactttctggatatgctgtgtttcagaaaattgggaaggatgagataactcctagaatttagccagaccactaagctgtatctgtactctggtaaagtatcaaagggaaccctctcaaactgcatgaaattgtctggggtacttttggggtaaagatgtgaattcctaggttctactctggagatgctgattcactaggtctgagacccagggatctggggtttttttaaaaaaaataagaatcctgagtgatttcactgtgaaagcttgacagatcataaatgggataatagttgtctgggrtatagcctttcctagcattcaagtattgctgaagatagaagtttataagaagtcttcatcagctcccacaaattttcttttcggtctgatgcttctgaatcactgctccttgccttcttcctctttatctccttgccttacttcaccatttttacctcacctctgcctgcagaagttacactcctgggcagattactaggaaagccaaccagaagaatggctagaaaggagaggttgtatatgtcaggttaattgaaagaaacagcgtcatccacttggccattctaaagcttgagtgtacgtaatgttagacatcaaccgtgtggttctttctaggacatttaacctcaaagaatgaactagtgagttctcggcaccagtactttagtctgacacactattgtaatacatagctaataaagttagtatggtactctctgccctaaagttgcatcttcatttcccaaccttgaaggagcagccctattcattcaacagattgtaagaacctgggctaggccccaggtgcgcaaacataaggcttggttctttttgagaaatgatgacaaacataactgcatgtgttctttttagatgtcaagtctgcttcaagctttgtctgcttatttttctaataaaaaggttttagaaaatcttttagctgttcctttgaatctaacaatattaatataactagagctttaatagaaatttcgtaagggctaaacaagaataaattagtcacagtgttttatgaattgcatgaattcccatcatgaagagaaatttgattaggctgtgggaagccaaaaatgtttctaaattattagcacctagttcctcaatccatttgcctataaatttggtataaaaacattgctagtgaaattttaaaaattatttttctataaaggcaggtccctrttactctcttayattaaatagaaatatcacaagatggaggaagggaatagaattctgaaccttctgtgatgtgagcagccatattggtggaatacaggccttacttagagtgggatattcattgcttggcaataaaggttaattgaactttgggtgagaggctaaactggaacctgtgtcattcattatttttatgggacaaatttattctgtgtttttgccttcaagtgaaccttttgtacaagtattaagaactgccttcagttcccatttccaacctaaagtggttgattggtttgccttccacagaatatttttattttcgcctttttttttttttttttttggtctcgctttgttgctcagctggagtgcagtggcacaatctcagctgactacagcctcaaacttctgggctcaagcaatcctcctgcttcagcctcccaagtagctgggaccacaggtgcgcctcacaatgcccagctaattttttagtttttgtagagatggggtcttgccatgttgccctggctggtcttgaattcctggggtcaagcaattcttctgcctcagcctcccaaagtgctgggattacaggcatgagccactgtgtccagccttatttttgctttctttgatttctgagttactcagaaactatttcagggcagtttaagaaggctgtactttttagtgtaggtatatggaacatctttttttgttttgtactatttcttttggacatatgtttgtgagctaattaaacttttctgtttcacttggtcactgaggttcataggtttttctcttaaaagacagaatgggctttggtttgggtcactgccacttgtttgaatatttaggtagtctccacagaaagtcttttatgtggaaccaaaaaattaccgtcttttatatacagtagctttcagaatgctttcacatcatttgacttttttagtaacgggcttgtgaagcaagcagagcaggtggtagagacctgctttttaggtggagaaactaaggttcagaaagagttcatgacttggcctaaattcggagctgaaaccaggtgtttctgatgctggttctgcttctcttttgccatactgcttttcatgtcatgttttctggcattttggtaatgacrttatgcttgaacacttgctgaatattaacctcttttggtttgggatattagcatttagatatttacaaattaacatatttggatttttttctttttaaatcatccagttcttcagtttccctgctgtagtygctccattcaaatgttccgtcctcccactgagccaaaaccaggagttcatgccatttgtcaaggaattatgtaagcaaattcaattgggtaaactccatgggaacaccatcaaggagactgaattttaggaaatgtatcatttatttcaataaaaatatagactgaataaagaatataaatgattttataaagagtacatgattttagcctgtactcttatttctaagcgagaggatatgcttgctcagatgttttattctggcatttgagtgaggcaaggtaggacccaagagtcagatttaaaaattatttacttctcatactgaccttggtgccaagttcatcgagggaacctgagtggagtgtagcaaccataatggatctacagccacagaatccacagccctgaaaggaatcctggtggtcatctggcacatccacttatttcagagytgggaaatggggagagtccattgacctgcttagagccataaaaatagaggtggtggagtcaggactcaccttctggccttggctcttggtcccatatttgttccccctatagctgtatcagatggaggtatgagtgaagatttggattcccgcaagggatttattaaactttagggatatttctttctcttgcaactcaacttgttgctttcttgtcttggtcccatttataagtctcctgagcttgtaagacagtagttagataacactgggcttaactccattgttttatttttaatttactttgtttattttggatagcggaagccctgaccaggcatggagtatctcacaaagtagacgattcctctgggtcaatcggaaggcgctatgccaggactgatgagattggcgtggcttttggtgtcaccattgactttgacacagtgaacaagaccccccacactgcaactctgagggaccgtgactcaatgcggcagataagagcagaggtatctggccttctctttggcatttttagccttagaaatgtgtactgcttcttactgatttgtgttggattttgatgtgtttatgctccctttcctttttttttctttttaattttaatgaacggcttgtatcagacagagcccagattctcaagtcccccggtttaattatgaaaatatccattagcacttctctaatattttataaacatttgtgttgctccaggcttattctccagcagtttgcttttatacttgtttgtttattgggcaagagaaatatgatcctaagaatttgttgccatagttttattggtaggctttggagggttagacattttaatgttttatttttacagacgcgtatacatgtgtatgtataagcttttccgtgttcatatattcaaaacagtgaatcatgtttcagtagttttggtcaataggaaggcagtaatggagatggtagaagcacagaaggagaaggatgagtggtaagggaaaggaaagagtagctgctttaattgacatctgcctgcctaatttatcacctttgagcacatacatcaagtgcctgttctgtgcttagcttgatacagaagtaatagggaaaacagaagcaaaagactgcttttttttctgaaggagtttatagtctaatccagaagtcgtgaatttctagcttgactttttagagaccrtctggctactctggagctgtgtccccatctgggtgtggttctcaaaagtgtggtccctagaccagcagcatcagtatcccctggaaatgtatgagataagcaaaacctccaccccagacctactgcatcataaactgggggtggagaggcagagggggcaggcagaactttcttagttttagcaagacctccagatgattctgacgtgcactcaagtttgagaaccattgctgtgtggcagccagtgtttggttttggctgaggaacagtagccttggtcagagctctccagtttgccagtcttatgtaattccctcacacgagttacttgactgagtcctgtttgttctaatagttaaatttaatacacatgaagtaacttcaagggacatggagatttagaaaagttaggaaaggctttgtggcagaattgagttgtctgggggaactggtgggcgttttgggctagaagagcatgaacccatgcctggcatgacattgtttggctctgtgtaaggtttcctgagttcaggatgaatcttcttcttaaaaatctgaacaagttggttgatacttggcttctctttccttgtytctagatctctgagctgcccagcatagtccaagacctagccaatggcaacatcacrtgggctgatgtggaggccaggtatcctctgtttgaagggcaagagactggtaaaaaagagacaatcgaggaatgaggacaattttgacaacttttgaccacttgcgctaataaaaaaaaaaaaaactactcttatgtccactttacaaaagaaaacagcattgtgattactcccagggaccgtattttatcttcagtggctgcctgattttacccccacaattaaagttgaaggaatcctgaacaaacttgtgatctatttgcttgtgtttttacattttcagcaaggctgtttctcccacgtttgggtagacatgctcatggcttaatgttaaacacagttaacactttttaaaaaattaacagctttattggggtgtaatttacataccataaaaatagcctgtcttaagtgtacagttcaatgatgtttagtatatttacagagttgtgcaaccaccaccacaaaccaattttagaacattttcatcactccaaaataagtctcatgctcatttacctcactcccattctaacctcagcccaggcaaccactcctctactttctgtctattgatttaccttttctattctttatcttattctgagaaaatgacgcagtgtgcaggtactgtgacagcagtctccaagcaggtgaaatgacttctggaaaagcctgaggtgaggatggggtggcaggagtggtgctttagggctgctaaccccactgtttgcagattctccaggaggggagggccttgccatatttgccttctatcttaaggcatgcttgcactcagctccactggtagcctggaaatcattaagctcttgatgctaggggaacccatctctctcgtctgatttagcaattcctgaccatcgcagtgtcttgattctagcctagcagtttttggctcaggttttaaggtactttacttcttttatgtttttgtatagaaaactcagaacgctgtgcttatttgtaagggaaaaattccaggttgtgtgaatttgagcagctgtttatttgcagagctatgaccttatctagtgtgcccacttcctcccctgcagtattggatagaggagtggtgatctccagtgtgcccttttgtttctagtatgaagaacaattgaagttgtgatttcttagatgtaaagtaggaatctcccagggatttccctcatttgtatctcatctccagtggtgcctaccgcagtgctgtacatagtaggtcttccataaatagtctttggatgagtctcgaatttttgaacagacttcttttttgaacaaacctctttgggaggaaagccttatactgaagcatatttctcttccgtctctgcttttatgagcattcattattaaattagaaggagccagattttaaataaactgagttttcattttctagggatttctctcacttcgaattccatataatatagcttttaactgggcatatgttctagcagctttacattggcagggggctgccctaactgcatttatttgctgcttttacagcaggtacctccatagtcaaacagtcaccacagcctcagacattggtttaagctcattaatagggaaagatacattaaatacatagtgagagttacctatcatcaggttggtgccaaagtagttgcggtttttgccattaaaagtaatgacaggctgggcgcggtggctcatgcctgtaatcccagcactttgggaggccaaggcgggcggatcatttgaggtcaggagttcgagaccagcctggccaacacagtgaaaccccgtctactaaaaatacaaaaatcggccgggtgtggtggcacgttcctgtactcccagctacatgggaggctgaggcaggagaatcacttgaacccgggaggcggaggtttcagttagctgagattgtgccactgcactccagtctgggcacagagcgagactccatctcaaaaaaataaataaataaagtaatgacaaaaaccataattacttttgcaccagcctaatactttggatcagaaagggattggaaccaagcctcacttcccttttcattggcaaatacatttgtcatgaggtagaggctggatattgaatctgcaagccctcttttgttccttcccctgggtagcaatgcgtgatttctcctggatcacctgctctaaagcaggtctctaaagtgatacctgagtgagggagacgggccggcagcagagctctctggttctgtctgtaccatgtttgcttgattttaagaacaagcagttgaagtgctgttttctaaatgaagagactctttacccacgagtttgcgtatgcatacgcacacacctcttctgttcaagcccaatgtgtatttaaagcatgggtctttctggcttaatgctctttgaggccttttaaattatttatatacctgtacgtaccggactgtgggcttaacaagagtgagataaatagcattgtatcttggagaagttactcctgtttattacttctcccaaaaatgatgggggaaggtcagattcttttttttttttttcttgtgcttagtgccaaattttatttttctttggaagactgacattaaacgtgagaaaaacaaaggataacaaaaattatctttattttcaaaataactttactaaactatactgattacaaataatacagtctaatgaaaacaaagccacttaaaaaagtttaaagaagacatgtatgtgtaattttctcatataattaacactttaaattattttacagagtgtcattttagaaatgggttgatactattttgaattatagaattaaagtatgatcagcatctaatacaaaaacatacaattagatattttctatttttctgcttttaactattatttaagaatttaatctttttagattagccatcagggaaaatatatagaatcacggtattcatttattatgtatatgaggaaattaacacctttataataactctcatgcttttttcctgaaaattttcttttttttttttaattatactttaagttttagggtacatgtgcacattgtgcaggttagttacatacgtatacatgtgccatgctggtgcactgcacccactaactcgtcatctagcattaggtatatctcccaatgctatacctcccccctccccccaccccacaacagtctccagtgtgatattccccttcctgtgtccatctgttctcattgttcaattcccacctatgagtgagaatatgcggtgtttggttttttgttcttgcaatagtttactgagaatgatgttttccaatttcatccatgtccctacaaaggacatgaactcatcattttttatggctgcatagtattccatggtgtatatgtgccacattttcttaatccagtctatcattgttggacatttgggttggttccaagtctttgctattgtgaataatgccgcaataaacatacatgtgcatgtgtctttatagcagcatgatttatagtcctttgggtatatacccagtaatgggatggctgggtcaaatggtatttccagttctagatccctgaggaatcgccacactgacttccacaatggttgaactagtttacagtcccaccaacagtgtaaaagtgttcctatttctccacatcctctccagcacctgttgtttcctgactttttcatgattgccattctaactggtgtgagatggtatctcattgtggttttgatttgcatttctctgatggccagtgatgatgagcattttttcatgtgttttttggctgcataaatgtcttcttttgagaagtgtctgttcatgtccttcgcccactttttgatggggttgtttgtttttttcttgtaaatttgtttgagttcattgtagattctggatattagccctttgtcagatgagtaggttgcgaaaattttctcccatgttgtaggttgcctgttcactctgatggtagtttcttttgctatgcagaagctctttaatttaattagatcccatttgtcaattttgtcttttgttgccattgcttttggtgttttagacatgaagtccttgcccatgcctatgtcctgaatggtaatgcctaggttttcttctagggtttttatggttttaggtctaacgtttaagtctttaatccatcttgaattgatttttgtataaggtgtaaggaagggatccagtttcagctttctacatatggctagccagttttcccagcaccatttattaaatagggaatcctttccccattgcttgtttttctcaggtttgtcaaagatcagatagttgtagatatgcggcgttatttctgagggctctgttctgttccattgatctatatctctgttttggtaccagtaccatgctgttttggttactgtagccttgtagtatagtttgaagtcaggtagcgtgatgcctccagctttgttcttttggcttaggattgccttggcgatgcgggctcttttttggttccatatgaactttaaagtagttttttccaattctgtgaagaaagtcattggtagcttgatggggatggcattgaatctgtaaattaccttgggcagtatggccattttcacgatattgattcttcctacccatgagcatggaatgttcttccatttgtttgtatcctcttttatttccttgagcagtggtttgtagttctccttgaagaggtccttcacatcccttgtaagttggattcctaggtattttattctctttgaagcaattgtgaatgggagttcactcatgatttggctctctgtttgtctgttgtttggtgtataagaatgcttgtgatttttatacattgattttgtatcctgagactttgctgaagttgcttatcagcttaaggagattttgggctgagacaacggggttttctagatatacaatcatgtcgtctgcaaacagggacaatttgacttcctcttttcctaattgaataccctgtatttccttctcctgcctaattgccctggccagaacttccaacactatgttgaataggagtggtgagagagggcatccctgtcttgtgccagttttcaaagggaatgcttccagtttttgcccattcagtatgatattggctgtgggtttgtcatagatagctcttattattttgaaatacgtcctatcaatacctaatttattgagagtttttagcatgaagggttgttgaattttgtcaaaggctttttctgcatctattgagataatcatgtggtttttgtctttggctctgtttatatgctggattacatttattgatttgcgtatattgaaccagccttgcatcccagggatgaagcccacttgatcatggtggataagctttttgatgtgctgctggattcggtctgccagtattttattgaggatttttgcatcaatgttcatcaaggatattggtctaaaatcctctttttttgttgtgtctctgcctggctttggtatcagaatgatgttggcctcataaaatgagttagggacgattccctctttttctattgattggaatagtttcagaaggaatggtaccagttcctccttgtacctctggtagaattcagctgtgaatccatctggtcctggactctttttggttggtaagctattgattattgccacaatttcagatcctgttattggtctattcagagattcaacttcttcctggtttagtcttgggagagtgtatgtgtcgaggaatttatccatttcttctagattttctagtttatttgcgtagaggtgtttgtactattctctgatcgtagtttgtatttctgtgggatcggtggtgatatcccctttatcattttttattgcgtctattagattcttctctttttttctttattagtcttgctagcggtctatcagttttgttgatcctttcaaaaaaccagctcctggattcattaattttttgaagggttttttgtgtctctatttccttcagttctgctctgatcttagttatttcttgccttctgctagcttttgaatgtgtttgctcttgcttttctagttcttttaattgtgatgttagggtgtcaattttggatctttcctgctttctcttgtggacatttagtgctataaatttccctctacacactgctttgaatgcgtcccagagattctggtatgttgtgtctttgttctcattggtttc

SEQ ID NO: 95844 - DNA, 17471 bp, Homo sapiens
atttataaagtgttgccattcatgaacagaacatgtgataaaattgcaaagaatttactacacaccacacacaaacccacccacccacacgcgtgcatgtgcacacatgcatgcccacagacacacaaatgagtacaagtaaaactcaagaaacctgaataagatcagtagattgtatcaatgtcaatatcctggttgtgatagtgtactattattctgatgttatactagatgttaccactgggggaacctgggtagggggtgcactggatctctctgtattatttcttacagctgcatacgaatctacaattatcttgaaataaaaagttttattaaaagagtgttgccggccaggcgcggtggctcacgcctgtaatcccagcactttgggaggccgaggcgggcggatcacgaggtcaggagatcgagaccatcctggctaaaacggtgaaaccccgtctctactaaaaatacaaaaaattagccgggcgtagtggcgggcgcctgtagtcccagctacttgggaggctgaggcaggagaatggtgtgaacccgggaggcggagcttgcagtgagccgagattgcrccactgcactccagcctgggcgacagagcgagactccgtctcaaaaaaaaaaaaaaaaaaaaaagagtgttgccaaagctctttccaaaattcaccttatagtgatttcaggcagcagactgtcatgtcttttgcaaatgggcaagtctggggcctcagctggtgatgagctgcccctctgcagatgctgtaagagcagatgaagggagacaccttggaaggtccctagcactcacagagtacctactgtgtgctgggcatcaccttgtcatcttcacaacaatctgcaaagtacatgctgatgcgcccccttagagatgaggaagctgaaggtgacgtgccttacccagcaaaggatggaattcagattccaattcaaggctctatgcccaaagccaaaataaagacgaactccaagcctcatcctcacattgccctcctgtcttcatatcttcatagaactgcttaaatgttagcatgcctgggagtcacctggggactgggttataatgcaggctctagttctgaggttctgcatgtctaataagctccaagacactactgaggccaccacactttgagcactaaggccccatcccaccacccagaatcaaagatggtcaattttttttttttttttgaggcaggatctcactctgtcactcaggctggagtacaatggcacgacaacagctcactgcagcctcgacctcctaggctcaagtgatcctcccacctcagcctcccaagtagctgcgactacaagcatgcaccaccacacctggctaatttttttttattttttgtaaaggtggggtctccctatgttgcccaggctggtcttgaactcctggactcaagtgatcctcccaccttgagatcccaaattgctaggtgagccaccacgactggccttattttttatttcttcaggttttgagttcacaagaaaacatttcaacagagtgtagattttaatccatttttaaatcataattcttatcattttattgtgttaaatgtaaattttcctcttttctaaaattaacagagctcatactctgtggaatttcagttcagtgagaaaagtgtcaattacataataaatggtgatggcataactacctatctgattggaagaaaataaaattagatgtctacccagtttattaaaaatgaatttcaagcctgggcaacatagcgagatcctgcttctgcaaaaaaaattaaaaattagctgaatgggatggcgtgtgcctacagtcccagctactcagaaggctgaggtaggaggattgcttgtacccaggagttcaaggctgcagtgagctatgatcccaccactgcaccccagcttgggaaaccaagtaagatcctgtctcaaaaaaaaaattcatattgaaatccaattaacgtgaattctaggtgggttaaaatgattggtgacattgagggtcttatatttgtcccagcatttctcatgtcagaattggcctctgccgctgcactcttgtatctgaaaagtctttgcagggctgtgatctcctcactgtgtgtacctatctggatcgctttgttctcctagccctgggccaaactcacttctccatgtcaccaggaaggctcaggaatgtcagttttgggggctgttcaagtaaggttgacttaattgctctccagtgcttggcaggtaagagacttgcaggttttccttgctgtaaataatgttgtaattaatacccctgtacatttgctttttctgtatttggattatttttctgtatttctgcattctgtatttttctgtattttggattcccatacgtaggattcctgggtcagagttctaaaaacttttagtataaataatttaggcaaataatcaccaaatttttttccaaaaggaaaatagtgctttttctttttaattttttaggaaaaatttttaatttttctctaacaaaatatgagataatgtaatataatgtaaaataataaatgtggtttttttttttctcttcaggctttcttcaatctaggtttagaaaatcctctcttacccagaagtttgataacaatttgaccatgatagcttctgtggttgatttttggaaagacattttagcctttattttggtgttttgtgtgagacgagggtctgagtagctgcttgcaactcaccagagaaaacaatctcatttacactggcaagttccctctttggactcatttcttcaccccacagagccaggcaggaagagaagtagcaaggtatcagggagcgtggaatgctgagatggtagtttccctaatcttgaaaaggagcttgatccttttcttatctgtctgacttttcaagtggtcttagtttcttgataggcagtttgaaatttgcccctttgcttactattgcaacagaagtcctcttgaatggaaatttccttgctctattttaaaaaaatatcactgtatagaaaggtgcctaagatgaggtgcacattcttaaaagggcctgaagcttagccctgtcatgaacaaagtgttgtcacattgatgaaggcaaacctaaggatagtggttctcaaccggggacaattttgcctcccaggggacatttgacaatgtctggggacatttttggttgttgtaacttcggagtgtactggcatctagggggtagatgccagagatgctgctaaaaatcctatgacacagttccgcacccccacccaacaaggaattacctggcctgaagagcaaatagtactgaggttgagaaactcattcttagaatatatccgtaagaggcttcactttgagaagattgccatagtgctgttaggacccttggttaggccagagtcacgaggcatgtagggatggagaaggcctgagtggtggagaagcaggtggaagccagagggtagagactctgaatgccaaaggggagtttggattcattcctctggcagcaggaggcactggaggccttgcgttaggaggggcatcctctatccatccaaggacatccagttgcagcatgatgtgtagttctgggaaggatggtctcttcccgccctgtacagaccccctagatgctcacgtcctgctgcaggggctctgggtaatccctggatagtacatgcatgtccacggttcaactccttaagtgttaatgctgggcgtcttccatgtgcctctccattctgctttccatcctctccaggctactgcaagtgccaggaagctgacatgtggactgtagtcaccactcccttccctctaaatttggcaggatattggaggaaggtaggagaaggaggtctgggtatttattctttagctactctattagtccgttttcatactgctaataaggacataaccaaaactgggtaatttatgcaggaaaaaggtttcatggactcactgttccacatggctggggagacctcacaatcatggctgaaggcaaggaggagcaagtcatgtcttacatggatgtcagcaggcaaaaagagagcttgtgcagggaaagtcccccttataaaatgatcagatttcaagagacttattcagtatcatgagaacagcatgggaaagacctgccccaatggttcaattacttcccaccgggtccctcccacaacatgtgggaattgtgggagctacaattcaagataagatttgggtgaagacacagccaaatcatatcagctcttttgctattggctgccgcaggaggccctctctgcacagctctgtctcagtctcactgggatgatggctcctccatgctgctagccctcaggttctgtgatggtgctttctatgagtcaacttggctaggtcatggtgcccaaataggtggtcagtcatgatcctggctgtttgtgtaagggtgtttttggatgaaattcacatttaaactttgagtaaagaagatcgccctccataatgtgggcgggactcatccaatcagctgatggcccaagtagaacaaaagactggccttccccgagcaagagggaattctggcagcagctggtctttggacttggactgcaacattggcttttcctggtcccacccttcagagtttggacttactggcctccacaattatacaagccaattacttaaaatagatctgattctctcagtgtacacaagctgggttctctttctctgaagaaccctgactaatagaggtaccatatgtcttccttccaccctgcccacaacttagttagcaccgtgcctttattgcacactcctccaatcatgtaatgcgagccctgcagtttcctgcctgctctgtatgccttttgcaggccagcacgacagccgcaggcctccctggaggctgcccaggcacccgccccttggaagccaggccctgacgaccgctgggtgttcctgcgtctgtggcatcccccatctgttgggccctgtggattcagaattgtttgtttacttaaagccagaacaaggcattcctgtccttcccactttcagggcaagaggcctgaacctccagtgtagcggattcatttctgtccggtttgtggccaagtcagagccatttcctagtgccaaaaacagagactgagcttttttctgtctgtgggagattctacaacccagtcccatttcaaagagaagactgaggccaggagtgtcttacccggagtagcctggtgagtcagtggccaggaagccaggacccctctgacagtttatgctttatgaccgggcgcccttgttctcattcatggagattgacgacaatttctgctcttctcccagtgacctgcacagtgatgccaagtcagccattctgctctgcctcctggggtctgaactgtgttctccagcagggatgggggatgcatgaagctgcacccactgcctggcctagagagagccactgggccccagtgaccaccaggcgacaagatggggatctcactgtgcactcaggtcacaacacctgtgacttagaggagtgactttggtccttacagtcagtgaagtgggcacgcaggtggggaaacataggtctgacacctacttggaggccacacagcagcatgtggctgccagggctgagagttgcacccagggctgggcaccatcaattgcctttgacggacatgggttggtccctagaggcagcagggccagggcggctgcagccccagctgtcatagctctggggttggggaaacctcaggtgtgtcagtgtggctgggaggtggtgagacatgcactgccttctgcatccccctagaaggagaagctcaaggaaaggcatacttgggaggagccatgggatgaggctggaatgctgggggtggagcctggagagcttggagccctcataagacctgatagcaaggagggggcacatttcagggacaccatgaagggtggcttcactgggggtgatgagtaccagaagcacttcctgcccagggactacttggctacttactacagcttyratggcagcccctcacccgaggccgagatgctgaagtttaacttggaatgtctccacaagaccttcggccctggtgagcagagggtggcccttccccttgagcctctctccaaggaacctggatggggatggggagacggtgtyctgggggcagtctggtctcctctaggggtttttggggatgggctgggggagcttctggggccctgccccctctctttgggcagctgttatgctggaggttgagtctgtctccccatggctcaggagctctgtgccagctgaagagcacagccccgtgcagttcccacactgctctccattagcccctaggtctttggggtggagcagaaaaggctctccaggtcatcatcaagttcagtcctgaccttgcacagccaggcctctggggcccccagaaggccaagggcaaacagcagggttgcagtgggacgggatcgcctgtgcccggagtgtgcagcctagatgtgtctgtgatgaggacctggaaaagccctgccctgggacaaggattgctaggtggggtctcaaccctgagcaaggggctcagaccccaaggacctcaactgagccatctgcacgatggatggtgacttctgcctgtctcccgatgatcactgccctccccatggtgaccccatgatttgattgtgtcttctaaactcaagcagccgtgtcctcactttaggcacttgactggggaacagtaagggtgagtctcctggtggtctgtgggataagagggggttaaaaggctgctgagcctggaggagcaggccggtgtgggaggcagaaatcagagaacagccggactgggtgtgaccaagcttggaaggccaagtgatggccccacgccagggctccagacagaatgttggaagtcatgcttcattccagcttccaggtgaccctggattcactcctggggccatcttcccagatcatctccttagccccggcttcctattcctgtatgctttcacccctccctcctccaaggaacaagaaacccatccaggaagggctggacttccaggggaggcttccagctcccagtcagcctgaaacttaaagggccactgmccccagcatgtcctctctgaactctccagcccgaatcttccccagagcagggcttgggcctctgttctctgtcccagaaatattatactcttggcttatgttcttgactgaaaggtattgggctaattgtttaaccttttacagactcagttttctaatctgcaaaatgaaaatagtgatagcagtcactacacagggtagttttgaggtgtaaatggaaattaacacatataaaatatttggcatgaggcttggcttacagggagctgccaatccrtgataaccaccaagcacgtttgccccttgggtaagaccagggtgtgtgtcctcatccctgtgtctgccttgggtctcgtttcttttacccatccattaccagtctttccctcccacaggaggcctccaaggggacacgctgattgacattggctcaggtcctaccatctaccaagttcttgctgcctgtgattccttccaagacatcactctctccgactttaccgaccgcaaccgggaggagctggaaaagtggctgaagaaggagccgggggcctatgactggaccccagcggtgaaattcgcctgtgagctggaaggaaacaggtaggggtgcagaggttggggagggggttcccagtcaaccttctttctcagaagtctccctggcctctttgttgtctctgacattttcaggacagtaggaccttcaggtataggaccagatgtcctgtggtggggatagagtagatggaatcccaagtttcaggattacagcagttttaggggcaagactctgatcacaggactatgttgaggtgtgatatagtcaagtaygaacactgaaaaccagatgattttcatctcttccttcttctcttccttccttaccctcatctatatatctacctctctatcttctatgtatctaactatccgtgcatatccatccatccgtccacccaccggttcatccattcatccatccatccatccatccatccatattcatgcatccacccacccatccatatccatccatccatccagccagccaactagccgttcacctatccatccatctatccatccgtccattcatccatccatcaatattcatccatccacccacccatccattcatccatccgtatccatccatccatccatccatccacccattcatatccatccatccatccacatacatccgcccagccatccatctatccatccatccacccatccatccatatccatctatacatccatcaatccatccacccatccatccatatccatctatccatccatccatccatccatccatccatccatccatgtccatccacattcatccacccacccacccatccatccatctttccttcttccctctattgtctgtacctgtgtgactgactatataatgtataatgacgtgaactcaccacccaacctgagtactcgaatataataaagacttacctgtgcttctctgtgactccttgcctctgcctttcccaacctcgggtaatcactaatatggattttatgcttatcattccctttttcaaaaaatttttttcttgcatacttatgtatatctaaacaatctataatttagttttagtcgcctttgagctttatagcagagtaatttgctctgtgtcatttgcgatttgcttttcatcactcaaaattatatttttaagatagctatattcatacattatctgtagtaaattcattaattcattcatccatccatccaataatgtttgttaactgccctctctgtgcttggggtggctttgtccatcctggggattaagggaagggggctcacatggaatcagagagagaaagtttcctataattgttctagccattctccctaaccatttttctttgggagaaactgaggctcagattgaagaagagcctgctgtcaggtcacacagggactcagggacagcaatcctttggggatccagagatcatctccatctgctggtcacagtggactgagagttcccttcagaacctcaaagggcctccccgactccctctctctctctgcagcggccgatgggaggagaaggaggagaagctgcgggcagcggtgaagcgggtgctcaagtgcgatgtccacctgggcaacccrctggccccggctgtgttgcctctcgcygactgtgtgctcaccctgctggccatggagtgtgcctgctgtagccttgatgcctaccgcgctgccctgtgcaaccttgcctcactgctcaagccgggtggccacctggtgaccactgtcacgcttcggctcccgtcctacrtggtggggaagcgtgaattttcctgcgtggccctggagaaagrggaggtggagcaggctgtcctggatgctggctttgacattgaacagctcctacacagtccccagagctactctgtcaccaatgctgcyaacaatggggtctgctkcattgtggctcgcaagaagcctgggccctsagccaggagggccagccagaggtctggtcaggctgtgaggccttggccatctgtatgctagagaggggtgaggaatggatgctgtctaacagtctctgatttcaacactaacattccatcttctgaaattctgagattctaacatccttgttttagaattctaagtttccaacattcctcattctaggatcctaggagtggaattttccattttctaatatactaagccttacagctatcttagatgcgatctgactcctgtgtgactgtggagcacccagggacgtggttttagagtctacctaatatgttaaggacaaggaaacctctgagtctacctaatatgttaaggacaaggaaacctctggacagtggtatattggggaattttttttttttttttgagacggagtctggctctgtcacccaggctagagtgcaatggcacgatctcggctcactgcaagctctgcgtcctgggttgacgccattctcctgcctcagcctcctgagtagctgggactacaggagctcgccaccacacccagctaatttttttttttttttttttttttatttgagacggagtttcgctctgtcgcccaggctggagtgcagtggcgcgatctcgactcactgcaagctccgcctcccgggttcacgccattctcctgcctcagcctcccgtgtagctgggactacaggcacgcgccaccatgcccggctaatttttgtatttttagtagagatggggtttcaccgtgttagccaggatggtctcgatctcctgacctggtgatccacccacctcggcctcccaaagtgctgggattacaggcgtgagccaccgcacccagccagggggaatgttctataaccagctctgtaaaggaaaagcactgatgtgtggtagtcaccaatttctgtggtgtaaatactcccaccatggttgatttcaagccaccagkggtttaataaccagctcataaatctcctaaatattttacagttgactctcatgagctgattggagtcagctggaacataccactgcctctagactaaggycagcagatttagcaaatacagactgccccagttcattgaattttagataaatgaaataaatctataaggttaagtatgtccccagaactgcatggaacatgcttaatctaaacaatgatttgttgttcacctgaaattcaaatttagctgggtgtcctgtatttcatctggcaaccctacttcagacccaggtgtaaggtacatggatgtgctttggtcaaggaataggccaaggcagagatccatgcctgcatgactcagtgggtttggtgcacaggcacacacctccacttgttatataacctgtttgtgtaagttcatacttggtctgagccactgttgtctgtaaaaggtaattgtcctgctaatgctgtacaggggctcttggggttcggctcagctcaacatggcttgacatggtgggcacactggcgcccagyaagagagagagagagccaaagctgtccgttttgcagatggacaggaaggagccaggacacagctcagcttgctcacgcccagagagagaaaaagttaagctgctgaccctgaaggcaagggagagcaggctgcacagctgtgtgtggaagccacgggctcaagcagccaaggcagkyggacagtgtgagagagctagtgtaagctgttgatgagagctgttgctgaataaaaccatattcacctgcctatgggccctgagtgttctttctgtccatctacccactcccctcagactttagcacgggctggacctggaccccaggacctgacaccaagtgagaagaggagcagcccagggatcaagggtattcctcgtacataaggtgcctttgtgcaaattaggaagaggtgctcctgcagatggacacattgcagaaaggagtgttcagggctgattaattgagaaaagctgttccatctccctgtggaagcgctatgagaacaaggtgcctcttctgggcagaccaattagagaaagatgtcccttccttaaggctgattgggtcacactactgagcacctgtcagcctccctttttccctcagccccaatctgtgcctttgtgtgggtacaccctgggcacagcaaccttgataagagccaggagacctggaatctactctcagccctgccactaattgtttcacttctctgggcctcgtattcctatccatgagatttaatctaataatctacaggaacatcctaagaacagcaggaagtcattgatgtggaagtgcttttttttttgaggcagagtctcactccgtcgcccaggctggagtgcagtggcgtgatctcggctcactgcaagctccgcctcccgggttcaggccattctcctgcctcaacctccccagtagctgggactacaggtgcccgtcaccacgcccggctaattttttgtatttttagtagagacggggtttcaccgtgttagccaggatggtgaaagtgctttttttaaggtgtagtttcactcttgttgcccaagctggcgtgcaatggtgcgatctcagctcactgcaagctccgcctcctgggttcaagtgattctcctgcctcagcctcctgagtagctgggattacaggcatgcaccaccatgcccagcaaatttttgtgctttaaaaagtaaaaggttttgcacaaattgacccattgatgttattcccccagagggtcagggctgagatggtctttcaaaattacccagtctaatctccaggttttttgtttgyttgtttgttttgagacagagtcacactctatcgcccaggctggagtgcagtggtgcaatctcagctcactgcaacctcagcttcccacgttcaagcgattatcttgctgcagcctcccaagtcgctgggactacaggcgtgcaccaccacactcagctaatttttttattttcagtatagacagggtttcaccatgttggccacactggtcttgaacctctgacctcaagtgatcctccctcttcggcctcccaaggtgctgggattacaggcgtgagccaccatgcccagccaaatctccattttttttgtagtcagggacgataggtcccaagagggaaagcgacttgtccagagacacacagcaagctggtgacagagctggagtaagaactcaggtgttctgactcctcgttcaccctgtgtaccctcattccaccaggtctccccacccggcttggaagggcagggggccctgcttccctttggctctcttttagcatagactcgtttctgtgataacatccctgccagcagtccttcccttccgggctcatgctttaccccagagagcatgtggaccccagctcttctctcagtacagccctctccggccttgtctggaaaggcattgaatatgggtagttttatttttatttttatttttatttttttgagacctagtttcgctcttgttgcccagactgaaatacaatggcatgttcttggctcattacaacctccgcctcctgggtacaagtgattctcctgcctcagcctcctgagcagctggaattacaggcgtctaccaccatgcctggctaatttttgtatttttagtagagaaagggtttcaccatgttggccaggctggtctcgaactcctgacgtcaggtgatttgcccgccttggcctcccaaagtgctgggattacaggtgtgaaccactgtgccttgccgaatatgggtagttttagacatgctcatggcagaatgatcaacaggcggaagaagtgggaggtccagccgatgtggatccctgagagcccatgtccacaaacaggggaagaatagtggctaaaataggtcttgtagggaattttaaagacaagtgaattgtctgttgaggcagccaaaaaggggctggcttctgccaggtggcagccaggcaatgtccaggagaggagattgccaaggaaaggaggctacaaatgccccctccttgtgatgtcaggacctcccttagcgagcgatctggccaagacacagggaaaagacacaggatccagacccggggctctgctccttggacggctcagtgcagagagtcagctggctgcctggaaggagagagtgggcaagggtgtgagggaatctttgggggctgtggaagctgttctaccttatgaaatggggctgggatggactgagggactatgctgtgctctgtcatttgtccataagtactctctacatgctctaataaaacattttgttttactctatccaatgggcagaacctgtgatatgctgtcaagactatgggggaaggactctttagggaagaaaaccctattgtgactaaaggaaggaaccttctgtttggggcagagaggcagacttgtaagtcatgaccattggtccacagaactgtttcatcatgcaacggtgaaactctgtacccgttagacagtaactcctggtctcccttcccctcgcccccagcaaccgccattctactgtgtctttatgaatgtgactaccctaagtacctcatataagtggaatcatacagtatttgtccatttgtgactggcttatttcacttagcataatgtcttcaggttcatccgtgctgcactgtgtcagaatttccttccttttcaaggttgaataatataccatcgtatggatatgccacattttgtttatccattcatccactgatggacacttggtggtgtttgtgtttgggctattgtgaataatgccgttatgaggccagccacaggtaaaactcactgaattctcacaacagctcatgtggacagtattattttgaaattccattttacaggtgaggaaactgaggcacagaccttctcaaagtagctattaagtagagagctgggcttatgaacccaagcactgtcattccagagcctgagcttaacctggaccccacactgtcatctcacaggggtgcagaagaacatctaactaggcttgggggaagtccaggaagccatggaggtgatctgtgagctgagagtgaagagtgaatagttcactgatggctgatggagaaaagggctagccattcccagcagagggaacacctgtgtgttgcggctaattacacaaaaacccatctccactcctaagtcatggcccctgtggtcctgaagtaacctgaatttgaaaacagaagacacaggagatttattatctgtgtggtaccccctacttcctacctatctacctccaccacatcataggaatcaagtagcaaggccaagccagacttggagagatgccagcagaagcatttcataggctcaaaaggacgtacatttcccaatctcttcctgacctatttctaactcccgtatccttatgsgggtggagctggaggttgaagggtctgtgggggaggtggggaagaggaggatgaaaccccaacagctcttttgccctctgcctgtaagttcagcttatcttatcctaatgcattcttgactccttgctgagaaatgctgcttatcttgcgactccattctagtctcaaaaaccctgcatttattctttttcctagaactctgaaaaaacccaagcttggggaacatggttgtttaccagagtcattttaactgcttatctagaaaggaaaggaacaaaagttggccattctggtcatctcagcttaggcagcacagaggtcatggagaaattttcgtaggcaactgcctctacttacgggaaaagctataaaaacatacagttgtgtacaagcacagaagtgagacaggcccaggctcgtgtggagatcaaggactgcaggacttgagttctgagatcctgcacatgtgggcatgttatatgtacaataagcgtgtggggtgtcatgaactgagatcctaataaaaagaaccagaggtatagaaacatgacaccttgaaacaaaagaacgccagtgttccagagattgctagttgttctcccgtgcccactatgcccattaacttcttcagagtaatagattttttggctgggctccatttagctgggcaaggctgccttaaacaagactatatttcctagtcccctttgtagctttgtgcggtcaagtgagtgagttctgaccgaagggatttgagcagaagtgtcgtaccagcttctggaagccttccttaagatgtcgtaaacctagactctgctatttactcttcatcctttaccctgtcctgtgatctggaatgtggctgctggcatcttggtttaggaggtcaaggccacacatggcggagaaacaagacagagggaaactgggaacctaataatgtgaagcactcatgagccctgggtttttatgtgagagacaaatagactttcatcttgtttaagtcactgatattattgttacccttattattattatggcagaaatgccagagaagtggtgttgtgtctctttcagtgcataaggaggtatgtaacattgatagtcctctggctggggatgataactttgatcacttggttaatgggttggccaacttctccatcataaagtgaacattttcccctttgtaattaagcagtatcttatggagagattctttgagatgacataaatatcctgtatccactagttttagcatccattgatgattcttgtctgaatgaattattatcattatcctggttgccaaatgatgattggcaaattccatcatcctttctacatttatgagttcacattcaaatgtaaggagaggctttcccttctcctttatatatctatatatatatatatatctatctatatctatctatctatctatctatctatatatctatctatctatatatatatctatatatctatctatatatatatctatatatatctatatatatctatatatctatctatctatatatatatctatatatatatctatctatatatatatataaacatggactcatgggttcttattttattcagttggttataatctgtgactatcataacttactctgatatacagatttagccagtaggaccccttttaagctgggtggtggtttgttcttctgacatgattcccttatttttttgagtacttccttactaagttactcttattttgagtttttctgtcactctgaatggaaatgggtactaaccattataatcaggcataggagtaaaagaaatggatgagggctctggggctgcctccttcagctctggacctagaggcccagcacttggcatgccggggacaggaaggggttcacaaagcagccacccttcagctagagttgagctgggaaggcactagttgctgcttgctccaaacagccttgtttttgtgaaggactcaagccaggaaacctgggatagtcacagagaagaaaccctgtgactatcctcaaggcctgccttaaagctgaggatatatcatggtctctgcatagagactgaagtagaagggaaaaatccctataaccatcagcccaagtgcatggagttcaaatattcaggtaaccaacctagaggaaggtgctccaattgaaccatcagagcaagggagccaggtttgtaaagagctgtagactaagaagtcagagaaccaggggagagggagagcaagaggcagaagattaaaaattgtgagcagcaggaggcatctccagggcacatacagaaaatcatatttgtac

SEQ ID NO: 95845 - DNA, 13081 bp, Homo sapiens
aaatggctacaaatttattgaataaatgcaactgcccaaaaagggcaaaataaacattaattgggtttgaacaaaaaagaggaaacaggattgaacaaaaaatggaaagaagaaattaggattgaacaaaagaggccatcttgaacggccaaaacaagagaaaatatattaaacaaatgtgtatccaagagaatgcaaactaaaagtgcactagattggataatgctaagtattggagaagctgtggtcaaatggtaagattattaatttggtgaaccagtttggttaaaaacagaaaaattcacaataaagttgaatgtccacataccttatgacaaagtcattccactcttgtgtatgttgtaagagaaattcttgcacatgtgccagggacttgcataatatcatgaatatcagcattttcccaataccagaaaatagagaacaactcaagtattcactaaccggagaatggataaatcaattttagtgcctcaattgaaaggaatactatgtatcagtaaaaataaatgagttattactttaagaatcaacctgaatgaatgcaaaatcattactgtattaaaagaaattttcagaagaatatgtgattatgattctgcctatataaactttcaaattaggtaaaacaaataaaattgtcatttagagatatgtgtatggatgcatggcaaaggtagaaagaaaagcaaggcactgattaactcatgattcagttattggttatgtttggtgaatggaagtgcacgtgctcaaggaggtgcatagagggattcaaagacattagtcatgctgtaatttttaggcttagaagcttttacagtgtgtttgcttttaactattcacatacgttaaatacactcctctgaatgatgtgttacacaattaaaaagtagaggttaaagaagactatctcttcattgcttttactccttgtccctccaattcatttcgcaaagcatcacattctggctcatgattcccactattttcctgaaactgttgcctctgggatcaccaataactttctaattagtagatgcaaatatatctcacttgaataagaaatcaccctttcttgcaacattctcttctattagtatctctggaaagccactctcccatttcttctctgcatttaaagaaaaaagaagtaaaaagtcacttctgaaggttaaattaactttaagccataaaaaaattatttgccatattttgcaaattgtatttgagtagcaaatatttattaagcacacactatatacagagcatggaaaattcagaaaacaatctccattctcaactctgttctttggcccatcatgtatggtattattatgttgttgcattgctatagagaaatacctgagactggataatttataaagaaaagaagtttaattggctcatggttctgcaggctttacaggaagcatggtgctggcatctgctgggcttttggtcaagcctgagggcattttcaatcatggtggaaggtgaagaggaaacaggtacatcgcatggtgtgagcaggagccagaaagagagcacacatgagagagagagagagagagagagagagagagagagacagacagacagtgggaaggtgccacacacttttcaatgaccacatctctcaagaactcacttgctatagtgaagaccgcaccaagacattaggtatatgctcccatgatccaaacacctcccaccaggccccacctccagcattgaggattacaattcaacatgatatttggccagagacaaatatccaaagtatatcaggtattatttagcaaaaattaatagttagtagtcatattataaaggcaattgaatgtgatataggagttaaagagaaactactagggcagataataagggtatgggagtcctcggtaaggttttcctttttaatgaaaagaagcccccaaatcattttctaacaaagaacagcctgtaaaattgagctgcagacatagacaaacaagttggaagcctgcacccatgaatgctggcagaaaaaagctacctggtactagacatgttcacaatggcttccttcccttggtcagctatgtgtaaggtaagagcagacaagatggtgaaaaggccacttgcataataagattagggcagggtgaccagcctttcccgaacgctatgtaaacaccacatcacacctggttgaaccaatctgtgggctctacataaatcagaaaccgcctcctcaagcctgcctataaaatctgctgtggtccccccaggccaccttttcccttttggatgcctcgctctcacaagagagaaagtgctgctctcctctctcttttcttctacctatttaatttttgctccttaacccactccatgaatgtgtgtccatatccttaatctcagtgcgcgagacaatgaaccccaggtatttaccccagacaacaatgccacttcaaatgtatcagttttaatgtgaaaattactattgtgtttgcataatacagttttgagtttcaaattagcaaacattcaaaattagagttttccctaaatgggtaaacacctgatctcttttctgaggcctactagatttatattttggtttttataaatatgtatgggaagtttatattaaagattttgtaattgtcgatcctttcatttaattaaacatttgaaagggtgcattttttccacattcataagtgttcatacggatttcctcaaattttccagagaagaaaaaataactatatttgaatggagctagaacatggaatggaaagtttcagttcaaaaggcatttttttccatcaagttatgaacatttgaacatggaattataattgaaaccattttgtatacttcaccatcaaattcattctgaaaataatgttttactattttaagcaacagatatagaaaactcccactggtccacagaatttattaaatgtctgcaatggcaccactgcattaaccatgctggagtggtcaatgaagtcaatggcatgatattaaggatattagatatgtgtagaagaactaaataaaacctgtagataaatttatgttttataatgaaccaaaaatttttgagatggtttaatgcaacacaattaagattagctagtgctagcttctagagctggtagattaaaacaaaacttgcatttagcttcctatgctttttcttttttattgttcactttccaatgatgatttaaatgagcactgagcagatcaaaaccaaatatctgaagagcatgtaagggagaagaacctacagataattcatttaacccaaatcagcccaatttacagtgaacataaactagaagagctttgagacactgattttgtgaagtccctgtgcccagtgctactctctctgtttcaagtttaggaaaaaagtggtttacatttgtcatgcctacatgctttcttcttactgacttctcaaactgctgcactaaaattgttcttgaaaagattactcctaaattcattttgagttttcagttaacttgagttacctgtagtatttgcattattgatcactctatgaaattctctctgcctctggcttcttctgatttcctttttaacttctaagacaaatccttctcagcttctttccctcatttcattttgcctttccctccattcccacaatttcccattttgttcttttcctacctgtcccacaaatgatggcatcccagggctccctccttagctcccttatagttccacgatttacattcttcatgataatcatctacttttttgttttaaatacgagcggtggttctctgctcctccttttttttttttttttttttttttaaatttatttttttattgataatttttgggtgtttctcacagagggggatttggcagggtcatgggacaatagtggagggaaggtcagcagataaacaagtgaacaaaggtctctggttttcctaggcagaggaccctgcggccttccgcagtgtttgtgtccctgattacttgagattagggattggtgatgactcttaacgagcatgctgccttcaagcatctgtttaacaaagcacatcttgcaccgcccttaatccatttaaccctgagtggacacagcacatgtttcagagagcacagggttgggggtaaggtcacagatcaacaggatcccaaggcagaggaatttttcttagtgcagaacaaaatgaaaagtctcccatgtctacttctttctacacagacacggcaaccatccgatttctcaatcttttccccacctttcccgcctttctattccacaaagccgccattgtcatcatggcccgttctcaatgagctgttgggcacacctcccagacggggtggtggccgggcagaggggctcctcacttcccagtaggggcggccgggcagaggcgcccctcacctcccggacggggcggctggccgggcaggggggctgaccccccccacctccctcccggacggggcggctggccgggcggggggccgacacccccaccttcctcccggacggggcggctggccgggcggggggccgacccccccacctccctcccggacggggcggctggccgggcagaggggctcctcacttcccagtaggggcggccgggcagaggcgcccctcacctcccggacggggcggctggccgggcagaggggctcctcacttcccagtaggggcggccgggcagaggcgcccctcacctcccagatggggcggctggccgggcggagggctgacccccccacctccctcccggacggggcggctggccgggtgggggggctgacccccccatctccctccaggacggggtggctggccgggctgaggggctcctcacttcccagtaggggcggccgggcagaggcgcccctcacctcccggacggggcggctggccgggcggggggctgacccccccacctccctcccggacggcacggctggccaggtggggggctgacccccccacctccctcccggacggcacggctggccaggcggggggctgaaccccccacctccctcccagatggggcagctggccgggcggggggctgacccccccccacctccctcccggacggggtggctgccgggcggagacgctcctcacttcccagatggggtggctgccgggcggagaggctcctcacttctcagacggggcagctgccgggcggaggggctcctcacttctcagacggggtggttgccaggcagagggtctcctcacttctcagacggggcggccgggcagagacgctcctcacctcccagacggggtctcggcagggcagaggcgctcctcacatcccagatggggcggcggggcagaggcgctccccacatctcagacgatgggcgggcgggcagagacgctcctcacttcctagatgtgatggcggctgggaagaggcgctcctcacttcctagatgggatggcggccgggcggagacgctcctcactttccagactgggcagccaggcagaggggctcctcacatcccagacgatgggcggccaggcagagacactcctcacttcccagacggggtggcggccgggcagaggctgcaatcttggcactttgggaggccaaggcaggcggctgctccttgccctcgggccccgcggggcccgtccgctcctccagccgctgcctcccgggcggtgctcgccggcgcggcggcaaagactgagacagctccgctgcccgctgaactccatcctcccggtggtcgggcggcggcggctgcggtcgggcggcggcggctgcagtcggtcgcggcagcggctccgcttcatatctgcagctggggcccgcgggcgtcagcgccgcgactgtcccggctccgcacctctctgctcctcctattcgacagacagccacatcttcttgtgcagtgccagccgcatccctaagacaccatggttaaagtgaaggatggagtaaatggttttggccgtattgggcacctggtcaccagggctgcttttaattctgtcaaagtagatattgtcaccctcaatgattccttcattgacctcagctacatggtctacatgttccagtatgatttcatccatggcaagttccatggcactatcaaggctaagaacaggaagtttgtcatcaatggaaatcccatcattatcttccaggagtragagcccatcacaatcaaatgggatgatactggtgctgattatgttgtggaatccaccagcattttcactactgtggagaaagatggggctcatggggtgggaagtcaaaagagtcatcatctctgctccctttgctgattccccctgttcatgatggtcataaagcatgagaattataaatcagcaatgccacctgtaccaccaactgagtagccccctagccaaggtcatccaagacaaccttggaaatcatggagggactcatgaccacactcatgatcactgtcacttcacccagaagaccatggatgccccctctgggaaactgcggtgtgatggccatggggctctccagaaatcatccctatatctacgggtgctgctaaggctgtgggcaaggtcatccctgagctgaacaagaagctcactggcatggccttccatgtccccastgccaacatgttggtacgagacctgacctggcatctggagaaacctgccaaatatgatgacaccaacaaggtggtgaagcaggcatcagagggcctcctcaaggacatcctgggctatactgagcaccacgttgtctcttactttaacagtgacacccattcttccaccttgatgctgaggctgcyattgccctcaatgactactttgtcaagctcatgtcctggtattacagtgcagttagctacagcaacagagtggtggacttcgcagaccacatggcctctgaggagtcagaaccccagaccatcaacacaagcaagagcacgagaggaagagagaggccctcagctgctagagagttcctgccacactcagtcccccaccacactgagaatctcccctcctcacagtttccatgcagaccccctgaagagggaggggcccaggtatccctaccttgtcatgtgccatcaataaagtctcctgtactcagccaaaaatattaaataaataatggatagataaattcatatgtacataaaaaaataaataccagtaatattctggagacttccaaataggaatttcctttcaaagctgtatctctttaaagctgcatctctagctccttaaaaggcatctccgcttgggtagtgtatcaatcagagtccagttaggagataaaaaccacaccaataatttagataggaaactttgaatgtacagaattaactagcaaaagatgattaattactaaaatgaggaaaaagagggctgtagaggtagagaaatagtaaatgccgaaagctacaacctctagggctatataaccatgaaaaactgagtaactaagattttaaaagagatgccctttccacctctctctgagactgaagtccagatctcttgggagaagatggggctatcagasgaacatgcagtggtagaaaacttgccagaaggcccaaggctggagttggcctgagggtttctgaggtgaatgtccatggccttccacatgctgatttactggctgccatatccaaagaaaagccacactgaaataggaagggagggcccttctgctgttatggcgttacagtatccctccagggctctctgttgacaaaacccaacattgagccagctagcaaaggagaaatgtttacagggtctggccagtatctcagagcaagaagcgtggatttaggggctcagatgtgataaactgagaactggcacaagtggtccacttatacctccaattcaacttgctaaaaatgagcaagttgagcaactcattttcctctggttcttctcttactcaacggtatcaccatctccctagctgcaccaactggaaatctgtaaggcatcctagatacttcacttttgctcagatacatatggtcagtcaccagcagagcccggctacgaaaagtgtgcagagtcatgacagaggcattgtcattccagctggctgtggagttacttaagagttgacttgattccacgcaaacagtgtctcccaagggcagtccctataggtccaggacccttgtctctgtggtggaaattgagctgttactcatgattctctccttttgctctgcagtttggagccttgggaaaatctctcatatgttttcttccttggaactctttagaagtggccagtcagacctgatgatgagagatatgtatttttttttctttgccgcttctgttttgtgtaacccaggcaaaaattatgtgaatgcaacaacacagggatatagtcagtattacagaagcctatttatgtcttatttatagcttattttaaaaccagtggtttttaccactaaaatataatctttttagtaatctgtaataggaacagtttttgctttgaaatatacttgtgatacaaaatgtatacagaaaaaaacatcgttttaatttaactatttgatgtattcctcatccaaatttcataagaattattttaaatgttctgtaaatatttctgatttcttctagagcatgtatcttcaatatatgtatattaatatacagatgatatacatatgcttctctaatcatgcattgagtatatatagaaacatatacaaatgtagtgatagactgattacgttaaaattaatataaagaaattctagtatttagttctgccctgatggactgtctcgtgtgtgtcacttaaggtttacgtatccagcattggtgacaattctgttcatctttgtatgaaaagggcaaacaggaaatcagatttctgtgtgttctctgaggaagtaccatagtttcaaaacagtgactagtttgtgtcctgtgcaggttcttatttaataagaatatgccttctagccttgcactcaccttaccatacacctctctgatgggtttctacttcagtcagggggcagaatggtagaatggagagaattgctgaagttttgtagtattgcaattgcagctctgtcattaactgattttgtgcccttgtgactttgtacaagttacctgatctcttttagacttatttttctggaaatagaagggtttcaagccagtaggatcaggcttgggagcctgtaaagcacatcatttttctgacccatgtgtaaagtactgtcagatttattataagctggtgcacttaagaggtatcaggaactccttgattggttctgtagtattgaactttgagacttaccagaagatagaactgaagctatcagaaagtggagtttctgcataaggcaccatatcaatgccagattatcaccaacaatattccagaaaggtggtcatctaatttccacctcttgggatggaaaattcactcctttttaaacagattatctccagtaagaaaagttttaaataaaactatgtatttaataccccaaaaccaaaaaattatatacaaatgtgtaataaaataatttacctttatatatatatatggtgacccttagaaaatctgaaggcaactatcatactccccttggtctcttacctttaacagaaacatgttcaattctttaaataaattttcacatgcagtgacttccagctcccttgcttactgatttgttattctctgaatattctggaattagttctggaattagtttgaaggttactagttcctgaaaagtggccccagagctggttttctgagcaggccccagctcctgctgagcactgcctcattttggggggcagctcattcctactccctcttacctactcactccaagaggtcttttcaaaagcaggcaaagcttcaagccttttggatcaaactccattcttcatttgtttctagatagctggctgaaagactgaaagctgaccagggcaggtgtttttggattttacttccactgtgtctttctgcttgacctggatctttgaacgctaaattttgttaggttttttgaatactaaaactcatttgtgacatccagttttccctgatatactggattctgacctcatttttgcccacaggactcccagtgctattctttctgcctgccagcatcccaggcctaatttctccagaatttcttatcttatggttatcttgagtctgacataaaagtctcttcttcctctcaattcctccagctctgaatgtctgcacaattcatttcacatttatcaaatgtaggcttgggtcatcagctacccttaaaagcacatgtctggtctgcccagttggattaatcatattctgtagttggaactagggtttttgacattttgatagtcaatacaatgcttaatgtaaatccttgaacaaattaaattcttaataatgcttaataagtaattgttaagctaaagcgatggccaaacatgacttctcctttaacgtactttggaaaatgattaggtttttggaccagtcattagatttgtaccttgaagaatttgtttatttcctcttctctgacttttaaaattgtgtcacatactgggtattcctttcaggtttggttgccaggaaagttataatgaagttcacctactatgttggctccatgcttcccttactgttttcaattctaacttccagtttgtatttctattatattaattgtatgttatgcctttctctcattttttagtaagatattttaaaatcctttctgagaaggaaggttattacaaatacatttgtacaaggctcttactaatagaaataaaacttttttaaacttcttttttgcattttgacatttaggaagtaaaaaaagaaccaatctgaagaagatataagaggcagagtaagtctagatccctacccattgaagaaatatttatcattttgcaaacaagctgattgtaattttttctgaaatgtaatgtaagatgaattaaataattggaacttcagatggaaaagagactgaaagattcatatgcttcaaatagtactactaagttacttagaacagagccatctggacagaatccatgttgatatgtgaaagaaaggtaagtaatttccttgagatatacctccatgaaatatcttccaaaatagacacaatatgagtttgggttataataagaaatactgaacttaaatcaatgtttaacaactctaagggacatggagtaactataaagcaataagaagttttgtgtgttgttcatttttactatttttgagtcctattccatattaccctaatgtcgtgacaaggtgaaaatggcacgtttcctataatcagtgctagatattagattgtattccaaattccataagaattattttatactacctagtttagtgctttagttttatattattgtctagttgatatcaaccgatggttacatacaggagacacaaatgcataaggtctagcaattgatttcaagagcttacttcctaataggagagcatatagactggaattaatctaattatatcagttgtatttcatcttgcctcttcaaatatatgatgtgtggctgcagagaattatgatgtcatcttatactttgatacttccctgttgtgtcaggtagcagtaacaacccacataaaaacaagcaggattttaacaaggtggtatgatacaactaaacttttgagatgaccctaccgtaaatcaccgtagtgtataaatccacaaaagagataacaaccttaaagaaatttaaaaagaataaaaaggctttaagttctaatatcagttggcatatagttaattctcaaagtgactggcacagttatccaaacagctggtgtttcacaagcacttgatgtttgattgattgatgtagaacagcaactaaaccgttggaacaatgatgtggtytctagaccacatcagtttacaaatcagctcatgggtacattgtagaagtactctctttttgctaggtgtcttttgttgcagggttgtcatccatgaaccttgcaatgggcaaggaaaagatattactttttctcccctacactaacaataccctttacacacacacatttaatattttatttggcacagaagccttcagaaatgaagacccagtgatccagggaaaaccatatttttatagacagtcatgaagaaatgtgatggtaaaaccaaaaggtattatttaatggtaataaccttgtggtggggggagcttagtaaggcccgttctttcagattcttcttggccttctggttataggtcataacctctctggaatgagggtcttgtgaccttctctcagggggataggtcagagaactatttcatggcctgcttcaggggagaaagatgggagaaggtcagagagtgacttttgggctttcattgttttctcaatttcctttagcttaaaatactcagtatgccaaggtggtatattttggggtattgtgttctgagccccaacatgagacatcaggatggtggtgatgaaggaaaaatgtactaatgaggattacaacagaggtggagtctggatctggtctaagataagattagcagtgttcccagactgaaagacaattacttggtgtttggaagtcagtcaaatattaagtaggtaagaaatggtaatcttaggactccactatctgggaaaggattgttcatgacatttagaggactgagaaatggaagatcaaagacaatgaccaaggtcagacaaatgttcaccctctgggagaaattttagtcaaaaaggttaaatggcccatcagatggaagtatatcaatttctgaggaaacaaggagatctcaagtcaggtttccagtactttggagtctagtagaggaaataagacagtattaaaaattatagcccatgataatgttcaaaagaaggatataatcaaagtactgtagaccaacaaagactga

SEQ ID NO: 95846 - DNA, 53514 bp, Homo sapiens
  misc_feature (1)...(53514): n = A,T,C or G
cccaagttcaccaagaaagtgggtagcattctctgaactttttgtatttttaatttttttaaaaaaacaaaagcaaaaagttgaagcatggagataagcaaaaagttgaagcatggagataagcaaattcacttgggccatgagaaagtcgtggtaacactgaaaatcatgagagaagcaagtgctgctccaacggtaagaagagaagcttcctcagtctgaaccactgggcccaggatgtatgacttattaaagatctcatacaagaatgaagagttagcctggctgtgattgcagaggccctctcccactcattcaccttgagctcacctgggagtagctttgaaggccaaggtcagaaaaatgtatctttggatccaaacattctcaggattgtgcctattgtctttttgattccacaactccatgacagcctgctaccagctggaactatgtattcctcctcctctctggatctttgctattcactgggtacattcttcccactatgtgtcatagtgaagaatatagccatttggagtcagacagatactagcttgaatcacatcacataacagctttaggtctatgacactattacctgcttctctctgcttccgcttttttcttctgtaaatgagggtagcaatagttatcttccagagctattacgaggattacatgaggtagcacatgcaaaacatggtagattataaaaaaagttgttccttttctttctttttcccaaatcatccaaaggggatttagtcaattggtaactctgaaaatgttaacataatatctatctctccacagataaatacatatgctagctatccaaaggtaagttaaaagcacagattccacagccaaactacacagggttcaaatccctttgtacttcagttgtcacacttgtaaaatggggataacaaatgtgccatcctcatagcatcgttaggagtggtaaacaaattaaggatgtaaatatatacaactaacctgaaaaatactaattgttccctaagtattataattcaagactctaatagtaacacttattatttagatagataggtactgtcgatgctaatatatcaatcacctccaagaaagctttgccaaagacctatgccagtttccctaaaatgtatattttggagccagagataatattttttagaagtgtcattctgcaaaaatgcatttcatagttttttttttttttggtgaaggacaaaaacagaggctatttaaaatcgttttccctctgcagtagggaatgaggacagcatttactctttctgcattctctgtcctagattattcaaataatactcatcctgataactttggagttgtttaatttcactgtaaaacagctttgaaaacagctatattgcccaaacatctaagttctaaaaacatcagtgtctcttttagatccaggctgttagctaatttcaatattcatttgtctattcaaccagaagtttactggagtttactatgtgccagacaatgttataggagataggtaaaaatccctgctcttatagagctttcattatagtgaggtgagagatgctcaattaacaaatagataactagaatatgtaatttgtccaattatggtatgtatcatggagaaaaataaatcagggaaaggaaaattaggtatcccaaagtagggataggaattgcaattttaaatagcataattggagaatatctcactgagaagaaacctatgtgtattactgagcgaagtaaaggaccaagctacggggctatctgttggaagagcattctgggaagaaggaacagygtatgcaaagccctagaggtgggagtgtacctggcatattcaaagaatggcacggaggctagatggctaaagtagagtgggcaagagcaagaagagtgggagttgaagtcacatgcacatgaagttacaagaatgttcacagaagcagtagtaatagaatcttgaaaccactcagatatctatcaatagtggaatgaataaattataatgtacttacataatggaattctacattgaaatacaaacaaaaaacaaactataggtgctctcgataatacagatgaatctcacaaacatgatgttgagtaaaagaggccaaatgctaaaggataaaaactgcatcatttcttttatatacatttcacaaacgaggcaacacttgcagtaaaaaggcagattagtagttaggacagagatatctgattggaaacgagctacgaagtgtcttctgggagggaccaagtagaagcaatatatgttcattttgtgataatttgcttaggatttatgctttctgtatgtatgttttacatatataatataatgtaatagtaatacaatattactatttataatagtaaatggaggaatttgagacaggaagtacaggattttttttttcaaaaagttttacgataacaggagcagagaaatgaggggaatactgaagggttattttaaagatggaagaaatgactgttacggaaagctcacttactcatatttaccattgctgcaaaacacctgttctattgtttacttaatcgattttcaacttaaatttacttaaaaagcaagtttcatgttaacactgtgtcacttgccataatagaaataaccgtaaaaatacaatggacacaaagtcattcgattaaaataatttaaaaatgtaaaaataattgaatgcaatcaaaatcaatcaaattgagctgcaaaaatgagcgcctaaaaataagttacttaaacagaaaaccagagccgttgatgatcagtcagaagaaaaaggatattctgttccatatatatgtaatagtcaccagcactgtgcacaattccttcatcttcacctttacactgcatacatactgttttgaacacctatccacattcattttaacagaggagcaaaataaaaacctagtcccatatgaggtgacaagacgatgctgacttgcccaacacttgaggttgtcccttgttcccatgtctctgatttggagggaagttgagctttagaaaaagcttcctaatgctgctgactaaaaagaacccccactcctatgtctcttcttagaaattactggtgtatgcatcagtgtgtgtgtgtgtgtgtgtgtgtgtgtgtgtgcatgtgtgtgtgtggtggggaaggtgctgctcagctgtggttctagcaaccctgcctgaaaccaggcaaaggcaggaggccatctagagggcacccacaactctcactaggccccaagtcattggctaagttccatactgtagaaaacactgccctataacaatggagacagtatcttccaagttaaaaatcaggcaacctgatatttcaacaagatacagtatttaaagataagagctggccgggcacggtggctcacgcctgtaatcccagcactctgggaggctgaggcgggcggatcacctgaggttgggagttcgagaccagcctgaccaacatggagaaaccccgtctctacttaaaatacaaaattagccaggcgtggtggcgcatgcctgtaatcccagctacttgggaggctgaggcaggagaatcgcttgaacccaggaggcagaggttgcagtgagccgagatcgcaccattgcactccagcctgggcaacaggagcgaaactctgtcttaaaaaaaaataaaaataaaaataaaaaataaaaaaataaagataagagcagcccagaaaacccataataatagtgccatacctaggacattcatgtattagtccacacatttgaaatgtttaaaatcaacactagtgctactgggatgtgaaaattcatagacataatccctgccctcaaagtaaggttgccagataaaattacagaatgccaagataaatttaaatttcagataaacagggatttcttttagtatatgtctcaaatattgcattagatatattaaaaatttatctgttgttcatctgaaattcaaatttctgggtgtcctacgttattatttgctaaatctggcaaccctacctcaaaaggttttcagtctattgaagggcaaagacaattcaaacacaatgagaatatgagaagtgtcaggaccaaagagccatcacagaatgcttgtgcatatcaaacaaatatctaacttagggaagacatttggaaactggtaacattggaactgagtcttaagctggaaacatatgggatataccatttatttcagcatttaataacatgccatcatgatttgtgacttaactgtctcataaacatgtgttttgtctacagaactagatcttaagttccttgaagacacaggacatctctttatgtcccccatgccacctggaactgacaggcacacttaaggcagtagtaaattactgcacacattgatgcaaatggttttgtcctcccaaagagtaaaaatattctgttagtgaaatgtattgtaactagtgttttcttttccaattttagtctttgaacactgcagccaagaatacagtttgaaaccttgggagtcaaattcacagtaaatacatgagccgttcacagtgcagcaaactctcatgttagttttatgacagatccagtgacactggaatggacacctttttgattttggggttccttcctaagacccccatgtgtgatatattcatggttggattctaggtactgaagcagttactacagctggatagtccaatgagtgtaagaaggcttctctacaaacacatgctgcccacatcgaagttcctctttaatctactgcagtttgaaattgtcccccactttctccaagagtccactccaagctagtttagggttaggtctaccatagcctttggaagagggagggaagataacttttctcatctctcctagtcccagctctaaagaccagaaccagggagaaagcaacacagcttttccaaacacattccccaaatgtggcaccttttcaacaattttagtaacaaatttaaggcatcatagatgcctttaaaattggcatgatagatgttagagtgatcataaaaagactttaaaagaggaaaagatgtaaagaaggtaatcaaatggggagcatgtttaacaatgtgctcacttcttccccttcaattccttgaattgagtctgcattatcattcctattgatctttgagcccagaacattactttgtggtctggcctaaggtttcttccaattttttaaattacaatatccctaagaggacagcgacgaggtctggggtgttatgaggattggaaacctagccacaagtgaccatgaaagtccaaaatgcctctaaagtctttgtctctaaggcccattttcaaggtcttgttatatagctaatttttccccgacttatgtcaaaaataaacgaagctgggttctaggtaaaatggtaggggcagattttaatcactactactactgcaatggggaaaagaacccagcgtgaactgaattcaatttcgatttgtagaggcaacmgggcgttttaaagagaatgaaggaattaggatgggactgatgacgccgagggggactgagcaactttttcaggtttgaaaagcctcaacatcaacgcgcgacggcgctctttcaacatcagcctccagaactggggctgcagccaggagggaactacaacgcccagcagccccggcgggtgtaaacactcccaacttccgaggcggtgctcaccatcggccatcagcgccagtgccactcgcgccctcaagaagccgcacggagttcgggccggcagcagcggctgcagtcgtatggcagtgagccgctgtctacccagcgagacggagagctcaggacgcaaccctacgagttggaagccgcaggaggcggaaccgggttgcgggatacgcgttgacgtcacatcctctgggcggggccgcaaggaacccgcgcaaattgaaaggtcagcctttcgcgcgctgtgtaggcaagttrcccgtgttctgcgttgccggccgtgggtgctctggccacagtgagttaggggcgtcggagcgggtttctccaaccgcaatcggctccgctcaaggggaggaggagagtcccttctcggaaggtgagaggagcgggctgtgcggaggctaatgggtgggttcccttgggggtcgacctgcgcgtcacctccgaccctcctctcgggattcgggtcttccaggaagggaaggagagggtctggcgtgatcttcccaacccaacagcggagcccttagcctgagtggagtatgtgttttgttccgaggggacgtctggcaaccagaggtctgcagttcagtgaacggagggagataagagagcagacgattccgggctggagcaggcgccagggttgccagacttacctcatttttccgcagaagctggcagtccaggttttacatgcaatctctccacctttaaatgttgacaagtacattttcccataatattttgcagrcctaaggaaacgtgtcgtctggaatgggcttgggggccacgcctgcacatctccgcgagacagagggataaagtgaagatggtgctgttattgttacctcgagtgccacatgcgayctctgagatatgtacacagtcattcttactatcgcactcagccattcttactacgctaaagaagaaataattattcgaggatatttgcctggcccagaagaaacttatgtaaatttcatgaactattatatccgttttcctcggagtgagagaaaactctttttagatatcatctgagaggtaagagactgtttttctgaaactgtggcttgaggaccacctgcatccagattaactgctttgtttaaaattcattcacagcagaactagtgaatcccagtcactgagtggagttgagagtctaagaacctctgaaatttgagaactgctggaccagagcctttagagctctgataaggtgtcaacagggtaaagctgcctcctgatcctgtactttctttcttyctttccttccaaacttaacgtttgataggagagatttgtattatgaaatgctaagcaactgctcagtgcccattactgactttttattgtagagtggggggaggtygtttcatcagaaagggttgtgacagttccagaatctctgtatagaaagggcttagggggctgcaaccggaatggaagggggtggaaagttaaagcatttgtcttgaagctgtatttgcatagcagacgcagtttcacagttctttagggtagctttcagagaggctgatggagttgcccctgggcgccaccactgtttattaccagaatgttcgtgcttagaataatgcgttctaatagcagtgaatttcagtcctaaaaaagtacaggatcatttctgtaattctttttgaatttttcctttgttttttaattgaaatacttaccttcctacaaactgttttgagtttctactcctatttgaatttgcacgttgacccttatgattaatgccctttgtagaggcaatgcgatgccatcgcatgcatggttttgtttgtgcctggctccttgaagcatgtgtcaggagtgaaagtgcaaaagcactttggaaagactaaacaaacaataagcaacagtcaagtggcattagaggtagtattagtgattaatgtaaattctaccctatggaaattgtttgatagggaggagcccagctaaaatattaaagagcagtgattcttgaatatctgaacaatttctggccgggcgcggtggctcacgcctgtaatcccagcactttgggaggccgaggcgggcggatcacgagttcaggagatcgagaccatcctggctaacatggtgaaaccccgtctctactaaaaatacaaaaaattagccgggcgcggtggcgggcgcctgtagtcccagctactgggaaggctgaggcaggagaatggcgtgaacccgggaggcggagcttgcagtgagccgatataggccactgcagtccctcctgggcgaaagagcgagactccgtctcaaaaaaaaaanaaaacaacaaaccaatttctgcattggactccaagctttctcttcatttgtctaagatgttttaataaatgtatttttctttaaatattactgttctccctgtctcttttcatatcaggtagttaatttggcaccatggggatacagggattgctacaatttatcaaagaagcttcagaacccatccatgtgaggaagtataaagggcaggtagyagctgtggatacatattgctggcttcacaaaggagctattgcttgtgctgaaaaactagccaaaggtgaacctactgataggtaagtctggaccttatgttaattctttgacaattaagaatgagacctacagtgcctttttttctcccccagaaacggattgttttcactcaatgccagaacttatcaggaagtaaaagttgtatgttttagaatattcccaaatcagggatgacttccttctgtgataataggcctagttttctttctttataataagccagagtatcaagacactgatggacaaagactattaatatctcctttattctttttttttttttttttttttttagatggaatctctagctcaggctggagtgcagtggcacaatcttggctcactgcaacctccgcctcccaggttcaagcaattctcctgtctcagcctcccaagtagctgggattacaggtgcacaccaccatacccggctaatttttgtatatttattagagacagggtttcaccatgttggccaggcaggtctcaaactcctcaagtgatccgcctgctttggcctcccaaagtgctgagattacaggcgtgagccaccatgcctggcccaattcttaacctaagataaattttttaacaaatgctttgaaaatccgtgatgatttctgactcccacattcttgggtacagaaaacatactgctaatcctggttagcaaaaaaacaaatgtgttgtaaaattcattataatttcatatttgctttctcctgaattttgctttatgatcagcaggtcccaatcattgttccataccaatgcaagttcactgtcactgatctacaacacatagaaaaaataaggatamcaatgtagtgagtctttcatcaagatgacatatttaaaaggtcatcttttttttctttattttagctgctaagtttgcgttatgcaaaaagattaaagattgttttcccattcctgtttttgagctaaaatgtccttttctttataaaatgatagaagttgtaaatgcagttgtttttgtcacaatacctaatgtaatacctgacccttgattggatcctggatttggaaaaaatagtagcagtggtgtcctggagccaattcatatgagctctttatacaccatgtcttctcagctcagcattcatttgagttcaagtaggtagctcatctgccattgagaaatatttatctcagggaaatcaggcacctcttcccgcagaactggttgttaaacatttaccaggacaccactgaatataagaaacattgttgagacaagtgtaccaattataatataaactgagtattagataatattatgttactattaaattacttagctgtgatatggtgtcgttggaagaatccagtgtttattgtactattctttcaacttttcaatagatttgaaattttttaacataaaatgggggggaaagaccagatttgaaaccaaagatgtcagaattagaagggatatcaaagctctttaattcacagataaggaaaccaaggcttggagggtcaagtagttcaccagacatcacatggctcgtaagtatccaaggcaggatttgaatccaagtctagtaagttagagttccaattcctatgaaaacatctgcttaaaataacaaaataaaaaaccttctctttccatagttttctcatctggcctaaaatagagcagaagtattaccttaagaaaggtgaagcactgaatgtttttctttttttccataggtatgtaggattttgtatgaaatttgtaaatatgttactatctcatgggatcaagcctattctcgtatttgatggatgtactttaccttctaaaaaggaagtagagagatctagaagagagtaagttaattctctacttaatctctaacttcattgcactaaggtcagacactgtagtctatatgataccaatttttaaaattttaagccaggctcagtggcttgcrcctgttgtcctaggtactcgggaggttgaggcaagaggatcacttgagcccaggagttcagcaccttagtaccctatgatcatcgctgtgaagagccactgtactccagcctgggcaacatagtgagaccccgtcactaacaattttatctttattttttgacagtctcactctgtcgcccagtctagagtgcagtggtataatcttggctcgctggaaactccacctcccggattcaagcaattcttgtgcctcagcctcccgagtagctgggactacaggcacgtgccaccacacccggctaatttttgtgtttttagtagagatggggttttgccctgttggccaggctggtctcaaactcctggcctcaagtgatctgcccgcctcagcctcctaaagtgctggaattacaggcatgagccactgtgcctggcctaaaaaaaaattaataaataaaattttaatttgttgaggcttattttatagcctagtatgtgaacagatttccttaaatgttatgtatctgctacattatcacttttgtttaaaagtatcttcgttactacattttctttgacaaaaagaattgctgtggaaaagcctaatggtaatcttktgtgtgtgtgtgtgcatataatcattctaagtcacttgttctttttgccttagaagcctaaagcatctgggttaatgttctcaagggcctggtgtgtactttctaatgagtcaaaaacttttttcagttctaggaaagcttcttgaattayagttctgttacagtttcttgagtcagcctcttaaatgttttayatttaaaaaatgttcttcccttgcagaagacgacaagccaatcttcttaagggaaagcaacttcttcgtraggggaaagtctcggaagctcgagagtgtttcacccggtctatcaatatcacacatgccatggcccacaaagtaattaaagtaagacaaaggggcagatgggcaagttcaccaaagctagttacaacttgtttaytgatgggagaggaagaaaatcaagggtggaaaattgttctaggcctaacctcaagtaaagggcagatgtcagaaggagaagggaacagcatcactagatagagaagacttcagcaatttccaaggagaaatcctaaggcataagtaaggctctctcttttaagtcatgttrttccatagcaatggaaggaacagggccaggcacggtggctcacaccagtaatcccagcagtttgggacgctgaggcaggagggtcatttgagctcaggaatttgagaccatcccgggtaacataatgagaccctgtctctattaaaacttaaaaaaatgaagagatggaaggaacaaattcctggaggcatcggtctcacccaactctcctacagtcttcaacacttactgtaaccggcactcttgaatgacagatctgtgatgtagcttcgttgccccaggcaccctacagacttctgttccctttcacctcctccttgcagcagcttctttccttattcctgtaaatcttagtgtcaaggtgcccacattcccagccctcactttcccctttttagagcctgcttggttaaggtgttgtggtttttttgttcgtttgtttgttttgaggcggagtttcactcttgttgcccaggctggagtgcaatggcacgatgtgggctcactgcaacctctgcctcccgggttaaagcgattctcctgcctcagcctcccaagtagctgggattacaggcatgtgccaccacgcccggctacttttgtatttttagtagagatggggtttctccatattggtcacgctgggctygaactcccaatctcaggtgatctgcccaccttggcctcccaaagtgctcggattacaggtgtgagccaccgtrcctggcctgttaaaggtatgatggtaaaggtgaagtcagctttttctagcttacagttctgtcatccagttcctgagctaaaataggcgctacasttctgattttggctttgtcatttgagtctctggctcttttctgtatgggtcaagctagaaggaaacgatgcgatgcaggacagagcgtgaagtataaagaaatgtgtgctctgtgtagtcaggagaagagaggctgcattgtgtgcrgaagtagagragaaaccctgattggacacaaatagtggtgtaaaagtgtgtccagaattggtgggwtcttggcctcactgacttcaagaatgaagccgcagaccctcgcggtgagtgttacagctcttaaggtggcgtgtctggagtttattccttctgatgttaggatgtgttcggagtttcttccttctggtgggttcatggtctcgctggctcagaagtgaagctgcagacctttgcggtgagtgttacagctcttaaggcagcgcgtctggagttgttcgttcctccctgggggctcgcggtcttgctggctttaggagtgaagctgcagacctttgcggtgagtgttacagctcataaaagcagcgtggacccaaagagtgagcagtagcaagatgtattgcaaagagcgaaagaacaaagcttccatggtgtggaaggggacctaagygggttgccactgctggctggggcagccagcttttattctcttatctggccccacccacatcctgctgattggtagaaccgagtggtctgttttgacagggtgctgattggtgcgtttacaatccctgagctggacacaaagattctccactgtccscatcagattagttagatacagtgtctacacaaaggttctccaaggccccaccagagcagctagatacagagtgtctattggtgcattcacaaaccctgagctagacacagggtgctgattggtgtgtttacaaaccttgagctagatacagagtgccgattggtgtatttacaatccctgagctagacgtaaagattctccaaggccccaccagactcaggagcccagctggcttcacccagtggatcccgcacggggctgcaggtgaagctgcctgtcagtcctgcgccgtctgcccgcactcctcagcccttgggtggtggatgagactgggcgccgtggagcagggggtggtgctcgttggggaggctcgggcggcacaggagcccacggagsgggtgggaggctcaggcatggcgggctgcagtcccgagtcctgccccgcaggaaggcagctaaggccccgcgagaaatagagcgcagcgccggtgggccggcactgctgggggacccagtacatcctccgcagccgctggcccgggtgctaagccctcaytgcctggggccgacagggccggccggctgctctgagtgcggggccgccaagcccacgcccacccggaactccagctggcccgcaagcrccgsgcgcagccccrgttcycrctggcgcctctccctccacacctccctgtaagctgagggagtgggctccggccttggccagcccagaaaggggctcccacagagcagcggtgggctgaagggctcaagtgccgccaaagtgggagcccaggcagaggaggcgccgagagcgagggagggctatgagtactgccagcacgctgtcacttctcaaaaggatgagagtaggactattgctggaccaaaaaaggaaaaaaaatgagaaaaatagcaaattgttaccaaaattgatagcagcaggatcttgatacctctttcctctttttttctttttttcttttttttttttarcttcccaaagcctgtcttcaggccttgggaaccattttcccatagtttagaacatggaagttccagttccagctgcctagattttgacacagcggctatgataggggctgtttttcttggcaagtttattttaaaagtattttctcataatgcattggtttaaatatagtgctatagcctataatatatatgtaagatacattattagaggagagttatgtatgtgtgtatatatacgtgtgtgtgtataygtatacacacatatacctacgtatatattttccccccaagacattgctggatatggtctataattttatcaatactgtgtcagtacaytgactttcgtagcttgacaggacaacctgttatttttatggggaagatatattcaaaactccaaacaaatgtatattttmggaacatagccattcttaagatggaagttttctataatttaaaataagtgggccaggcacaatggctgaacgcttacaatgccaacactttgggaagctgaagcgagtggatcacttgagtccaggagtttgagaccagcctagacaacatggcaaaaccttgtctctacaaaaaatacaaaaaaattagttgggcatggtggcatgcacctgtagtcccacctactcgggaggctgaggtgggaagatcacctgagcccagagyccaggaggtcgaagctgcagtgtgccctgccggctggcaccactgccactccagcctgggtgacagagccagaccctgtctccaaaaaataaaatgattacttttgtaacttgtaggattctttttwyctctggctgtgtagcagtatttcttttctccaaattttataagttgattttttaaaaatgtcttaatggctatataattagttcaacatatactaaaacttayagtagaaaaactctacttcaaaggaaatgatttctcaaagtaatattagcatgtgcctgctgaggctagtaataaagtgggtttgaaacaggaagttgtttagtactttccagatgccgtgctagagattcactgtgattctctcttctaggctgcccggtctcagggggtagattgcctcgtggctccctatgaagctgatgcgcagttggcctatcttaacaaagcgggaattgtgcaagccataattacagaggactcggatctcctagcttttggctgtaaaaaggtactcacctctgactactrtatattacttttctatgtagatagtagtgtaaatcaaggagctgaaatttttcctgtccaggaaattatgataatttataatatttataaaatttataatatttataaaatattacaaggtaaattattgtatttaatagatatttgcaactgacatctatttttataatgttaataattatttaaaatgaaaagaagggttttgctgcttgatgtttgtgtaatgtggatactttttcaaagtaagcccttaaggttggaggggtttgttattgttttatgcagattctttagtagaatgtggacgtaccagttttattttttaataatgacaacatatgctttatatttcttgattaggttaggtatactaacttatgtactaaagggttgccatgcagttatttagaattatgtataaaactatttcatggaaaactttatttaggggagaattaagatacaaaactacaggatgttctcatttttgttaatgcctatatttatgactagaagggtctctatcaaaaggttaatactaggttacagtgataaatgagggaatagggatgacttgttttcttcctgaatttctatattttccaaattttctacaataaacatgaattgcttcaataataaggaaaaagattacttaaaaggtacaagtgacagagaaagagaaaatgtttttcgtatgcattactgtttgattatcatgacaaccctgtaacacaagtaggaaataaagagatgcaaaaagagcttgctttataccagaattgtgacagttgagtcctagctgtatagccttgtctagtcatatcctatgcttcagcatactttatttgtaaacttagtaatcatcagcctgtctatctatgtctcctgtctttcagtgttatggtgaagaacaagaaagatttcttaaaattattgcagtggattagataatgacaaaagtggcccttctaggtattaacaatttcccttycttttgaaggtaattttaaagatggaccagtttggaaatggacttgaaattgatcaagctcggctaggaatgtgcagacagcttggggatgtattcacggaagagaagtttcgttacatgtgtattctttcaggttgtgactacctgtcatcactgcgtgggattggattagcaaaggcatgcaaagtcctaagactagccaataatccagatatagtaaaggtaagagtgatttgctaagtgtcatattcaatttctgaagcatttccttaataaaataataaatcataatatggatttaaatattctgttatgcgaataacctatattayattattaaaaggagcaaatgactgaggcactagaactttgccttagcaactaacatatattgggaaaatcatgttttctgcaattggcaaaaaagtagtgatttttaaaacaaagactagtataaagaggctcaaggagaaaatattctagggtaaaattaaactcggagtcttttgacttctgtgctataactctatagtagtggttctcaaactgtttggtcgcaggatccctttacactcctcaagctcctttatggtaatattttttgtttatgtaggcgatagctattgatatttactgaattaaaaattaaaacaaaaatttaaatgtttatcaattcacttaaactttataataaactcattacatgttagcataaatagcatgcttttatgaaaaataatcattttttaaaacaaaaattatragagaggaatcatacatttatgcaaatctctttaatgtggcctaatagaagacagctgtgttcgtatacaagttgaacatccctaatccaaaaatctgaaatgttcaaaaatccaaaactttttgagtcccggcaggcaagtgaaaaattccacacctgatctcatgtgaagagtacacaaaataattaaaaatactgtataaaattaccttcagtctatgtgtgtaaggcttatatgaaacataaattgagttttttttcttcttcaccctcttgctgtcagtgtgtggaaacgtaaatggattttatgtttagacttgggccccatccctaagttatctcataacgtgtatatgcaaatattccaaaatctgaaaaaattcaaaatctgaaacacttctggtgccaagcattttggataatgtgtacccaacctgtatctgctgccttattaagcctcatttgataccatgtatcatatatcatctggaaaattctgagactctggacattgctactttgtagtttgtcttaaaaaataaacatcaaagaagctcattttcccccttggatattctctaaacccttaacagtttgcagagcagaaatttcatttttctatttccaggagtataaggcctgagtcctcaggactaagagtgatgtcatgtaatggaaagatctctaggttggaagatagtgtcccaggtgggaataggaccacgtgccttaactagcctgtgactccaggatccgtttggttctctgggccttccctttttcatctatgaatttactrtgcaatgtttaggatcctttccagctttaagcatccatgactctcacagaaatcagaatgtcaacttggtttaaaaatatgatctagaaatatttgcatttttttaattctcagattttggatgttctttttttttcctttcttgataaaaaggactttgaagatgaatggataatgtatctcaaagttacacctagaagcacaaacttgatgtactatataactgtattttttttatccttcaaattagtaatagaaaaaccaaagaaaatactagttatgagacttagaattttaagtgatgtaacatggttgtgttagctggtagaattttttaatgtagatgaaagcagttaatgtttcaatccctctttatgaatgtaaatcaatcagccttgaggataatatgttccctgttctttagttgcagataaaatatttttgcatgcattgttaggttatcaagaaaattggacattatctcaagatgaatatcacggtaccagaggattacatcaacgggtttattcgggccaacaataccttcctctatcagctagtttttgatcccatcaaaaggaaacttattcctctgaacgcctatgaagatgatgttgatcctgaaacactaagctacgctgggcagtatcctttctgaaacagaatggtagaatttgtgcatttttcttcaatatttttatggtgatttttttgtgaggcatttagtaaaaagcttgcacattattttttgctctcttttttatagtgaaatctgtatattgttcatttaaattaccatgctagtgaaaattgagaacaactttttgtttataaacccgaggctcatccactatgcatcctgattacttagattgactgacagwagcatgcacagggtccgtcacttacggtacacattccaaaggtggctcttgagaggacctcctcgtggcaagcaagctcgacttatcaggaagagcattctgggcatttgagtgcatcaggagaggatgcccttcccatagccactggccatgtacatgcaggctgatgcagagccctgagtcacttaggtggtggctaggactttcccctctgtttcccttaaaggsagggagtcagtgatggcctgggccctygtcagaagacaccaactcctgcagagacagatagagactagcaaactgtgtctgctttcagtaatgctgatgtataaagtaaggagactccatttaagtcataaacctatggattttcrtgacaatagaaaacatttttccatcttagtataatatcatttggttggttgttaataaatacatttttccttaatcttgctaatctagatatgttgatgattccatagctcttcaaatagcacttggaaataaagatataaatacttttgaacagatcgatgactacaatccagacactgctatggtaacgttttgatgaccaccctatgaaaacacgttttagttatgtccygagctgtgattaaaggcaaatcttcatacactaagcttcttttaagcgtttctatatccaggctctgtgcagaatgtacattaaaaacaacttgatcctagagaaattacatgtattagagcataggtatattggttaattttttaaaattaagaagtgactgttatttattatcaaacccttatccttgagcatttcatttgaatataccaagcatttgatgcctttttttctcatctcactccrttcggcttctgtggcatttggcatcattgaagacccaagcctaggaatgctacgggagttaaagctgttttttcactcatgcacaatttaacaaatatttaatgcacgcccctgctgtttctttaaacaatttgctgttttcttttmhtttttcttttttgagacagagtttcattcttgttgcccaggctggagtgcaatggtgcgatctcagctcaccacaacctccgcctcccaggttcgagcaattctcctgcctcagcctcctgggtagctaggattacaggcatgcaccaccacgcccggctaattttgtatttttagtagagacaggatttctgcatgttggccaggctggtctggaactcccaacctcgggtgatcygcccacctcggcctcccaaagcgctgggattacaggcgtgagccaccrctcctagccgcgatttgctgttttcttctgcttcttcagtattgtatgtattccttaagatactgtctcccatcattgtctttctctttgtatttctgtttatcctctgttctcttttctgtttacatttcttccttaggtaagtccttagggctttaatcccatttacgtaaagaactcacatctccatctttactccagtctctcgcctgtgcaccaaccacagaattctcactgtctcttgcgtctctgatttcctgtagcctccaagtctatttataggcaaaactaaactcttcatgtttttaatcaacttttaatcacatttctcttttatttcctacttagcacttattactgtataacatgcttctattcttttctgattctttccaatagaatgtggtcttcataaaggcagaacttggtgatcctcactgctgtatgatatttactatgtttatatgttgagtgaatgagtgttagccacaggtctcttttgttctcacactggaaaacttggaaataaactttggcttccatttcgttgctacatcctcttgcctctttgagttgtccttctggttaacattttcttcttttcccaagcttccagtttaattcttgctcactaatttattyctttactaaacatttatcaagcactgaaacaatgtaattaggttagctagggttctggaatataaagaaaaataagaaatacaggaaaagtaagatccttgcctgtcaaatgcccattgcctaaataggaaggagaagggattctatagaaagaaatgcggtaagtgctacrctaaagaggtattccaggctctgtggaaataaaaagcatgtccctcactccacctaagagaatgcttcctaataataatggcaaacattttctgagcatttgctactttccaggtgctcttttaagcaccttagacatagtaagtcatttactcttcagaaagcctctgaagtcagcaccattctcattttacagatgaggaaacaattagaggacacttaagtaacttttccagctgaccattttcgtaaataggggagctgtgattccaagccaagttctctactgtctgctgaaagagaaactgatgtgtatcctcagtttgcaaggattagtrgagtttttcaagatgggtgattccaggctaaaaaaaaaaaaaacaaaaaaagsgtatgtagaaaaaagtgatatattaagggaactcttagattgttcattatggatgggctaagaatatcttagtgtttaccatgtaaaggaaccagatcttgagaaaaaaaraagtgagcctggaaaagatgaccactaacaaactggtgatccattcagcatggaaaagtaaccattactgtaagctgaaataagccaagcctaccaagagagcacaaatctataacgaccctaaaaatgaactttatcagcttcagtgatgtaaaccttacactcaggttgctattcccctattttctaaccttgctccrtgtaatacggtagccactagccatgtgtgrctatttaaatttgttaaaattaaatacaattgctattttacttccttagttatagtagccagctttcaagtgcttagtggttagtggctaacatagtggacagcacagagcttttctatcagtgcaggaaattctgctgaattctttacttctactatcatatttttatatctagggactctttaattgtacttttttttgaagatttagatgtcatctcttatctttctcagaatatgataattttttgaacgttttcttccgctctctgtaactgctgtgtacctktttcctgtgttgatattttctccctcatggtggtaacttctggccagtcatatttgaaggggccccgaaaagctcatggggaacattgtgtgaatgagtggggcttatgatgttggacttcattcttggatgatgtkgttggtaacacattggatttgatttgtgaattctccaatgttggaatgttctctgcacagttacatttttccaaaaagagatgtctgcttagggtatctaaactttggctgtctgtattttgaaagcaggatagggaaagtgagttggggcaggccaggaaagggtagcatggttccttgccattcaatatttagccttttgtttcatctctgttttcagacaaatgaatctatcttcagaaatgcctgctatgtctgttactctttgtgggtttcaaaagttcarttgttctggttctgaaggcaggtagatgtttgttgactgtatagtcaggttggagatggggacacagggtcaaataattctctctttcgttagtcattcccccaccaggggcttctgtaattccaagactttaattcttgagcctttctccaggtttctgtaggtggaattggcttctctttgatattctcttctgcagacaaagtcttttaatttcttccatctatgttctatcttcacygtggtttagaagtcacagattatctcctaatttttttgcaggttaattttgtgtttcttattgttttgaggaatgattatggaaagaaggagactgaaaagtgctatctttacacagctgaactattgacagtatttatcatttctttctttctttttttttttttttaaatttgagacagggtctctttctctgtcctccaggctggagtgcagtggcaccatcagagctcctgggctcaagcgatcttcagtaactggcatcaagcctcttgagtagctggaactacaggcacatgccaccatgcctggctaattttgtgtgtgtgkgkgkggggtctcactatgttgcccaggctagtcttgaactcctggcctgaagcagtcattctgccttggcctccaaaacttctgaggttacacatgtggagccaccacacctggccacagcattatatatatatatatatattttttgacttgaatatctctttttttttttttttgaacagaatctctctctcttgcccaggctggcacgcggtggcatgattttagctcactgcaacgtctgcctccgagtttcaagtggttctcctgcctcaggctcccaactagctggaattacatgcatgtgccaccacgcccggctgatttttgtattttagtagagatggggtttcatcatattggtcaggctggtctcaaactcctgacctcaggtgatccacctgcctcagcctcccaaagtgctgggattacaggtgtgagccaccaygcctggcctataatttcattaagaatgattcttaagcttttcctttgtctcagaaactcaaaaatagttgacagtgttgagtatgtcccattaccaattgtaatgttatggaatgctaagatggccatccttcatcagctcaaattcctgtcagaattttgtccttctcatagagaaatttctataggaaccataattgtacaccaaatgagttatttttatktatctaaaatttatttagtctggttttctacttgtctatttctctttcttatttagtaaaaccatcagtgggayctaatgccatgagccatactgataaagctatctttttatattcgttccctcaattaaattaccttccttattaattctcaaagggtattctgaataatgtcacckgttttatttatttttatttttgtcctttctttaagtgaaaggstttgattagattctgagttcatgtgggatttttgtcaggtgggattgtaatgattttttttgtgtctttgctaattttttcyctttggctgtccttctctgttagaatatcattgacatcctcttagcagatcattgtcttccaaaatttgtagtaattgtgaataacttatattagcattaaaagtgattgctttccttttttgtttgtttgtttttgagacggagtctccctcggctcactgcaacctctgcctcctgggttcaagtgattctcctgcctcaacctcccaagtagctgggattacaggcacacgccaccacacctggctaatttttgtacttttagtagtggcagggtttcaccatgttggcaaggctggtctcgagctcctgacctcaagtgatccgcctgcctcagcctcccaaattgctgggattataggcgtgagccaccgtgcctggctgctttccatttaaaagacaccgttttcctgaccacatttcttcagttgtggtcttatttcttgcaccatttgtattacgaagatttttatttatttatttatttatttacttttaatcttttttttctacagctgctagcaactcttgattttttttttttttttttttagaaatgagctaacaaagttgcttgactctcatcagaagaaaaacaggcctaggaatataagacacatttaatggaaaagtataggaccagcaaagtaggaaatgttattcaaggacagctgtttcatcaacagctattgtttttaagggtaacttaagatgtttatttataatttatgttgatacagaaggaaataaattgattattttctttctgcaaataatctttttccttttccttttctagcctgcccattcaagaagtcrtagttgggatgacaaaacrtgtcaaaagtcagctaatgttagcagcatttggcataggaattactctcccagaccagagtcgggtactgtttcagatgccccacaattgaaggaaaatccaagtactgtgggagtggaacgagtgattagtactaaagggttaaatctcccaaggaaatcatccattgtgaaaagaccaagaagtggtacgtatttcagttttgcaaaatgctggtgaatattggtcatatttaaagaaatcattgcccaacgcaaagtcgcgaagattttctcctgttttctcctagaagttttatagttgtattagtccattttcaccctgctgataaacacatacctgagactgggcaatttacaaaagaaagargtttaatggacgcacagttccatgtagctggggaggcctcacaattatggtggaaggtgaaaggcacttctcacatggtagcaaacgagaagaatgagagccaagtgaaagggttttcccttataaaaccatcagatctcatgagacttattcactactataagaacagtatgggggaaacggccaccatgattcagttatctcccaccaggtccctcccacaacacataggaattatgggagatacaattcaagatgagatttgggtggggacacagccaaacattatcattagttttagctcttacattttacagttttagcctgtgagccattttgagttagtttttttaatacgatgtgatgtaaggattatggcttttttttttaatcttgtatatatggctgtccaattgttccagcaccctttgttaaaaagttttcctttccccatttaattgccttggcacagctgtttaaaatcagctgaccacatatatgtggatctttttctgaactctgttattctataccattgctctccttacttatctttacatcagacacattcttgattactgtggctttatagaaaatcttgaagcggggcagtgtaagtctcaagttagttttcttttgaaaagttgttttggctattctgtgtttttcacgtttccatgtacattttagaatttagctttttaatttctaaaaaaaaaaaggtcaggcatggtggtttgcacctacaactgcaacgttttgggaggccaaggcaggtggattgcttgagcctaggagttcaagaccaggcttggcaacacactgagaccctgtctccacaaaaaaaatttttaaggccgggtgcggtggctcacacctataatcccagcactttgggaggccgaggcaggcagatcacttgaggtcaggtgctccagaccagcctggccaacatggcaaaaccccatctctattaaaaatacaaaaaattagccaggcatggtggcacacatttgtaatcccagctacttgtgaggctgagacaggggaatcacttgaacctggaaggcagaggttgcagtgagcggagatcacgcagtgcactccagcctgggcgccagagaaagaatccatctcaaaaaaaaaaaaaaattaagaaagctgtcagctggttattctccaaagctgcagcttctctgctcaaagggtcttactagttcagaatacattatcgtaaaacaaaaaataaatacaaaagaaattttttaaacattagtcaaatgtggtgacktgtgtctgtagtcccatctattcaggaggctgaggtgggaggatcgctcgagcctcagagttggaggctgcagtgagccatggccacatcactgcgccccagcctgagtgacagaacaataccctgtctcaaataaaaagtaaaaagtctattgagagttagttaaatccatacatcaatttggagaaagtggacattttaacaatactgagttttctgattcattcatttaagtctttaatgctttgtagctttcattgtacagatcttaacatatctgttgtcaaattatctttatatttcgatttttgatgctgctgtaaatagtattttcagttttgttttctagttgttcattgatggtatatagaaataccattgatttttgtacattaatcatatatttgcaaccttgctcacgtcacgtattagttctagtatctcttttgtggactatgtaggattttctatataaatgactgtgtcacctatgaataaagacaatcttgcttctccttttccagtttaaataccttttatttctttttcttagtataagaatctaagcttgttttcttttgaactgcctgatttcaagattataytgcctgacttcaagatttcctatgagccacagtgtgtgatgtaacagtgtatctgatgtaaagataggtaaggagagcaatggtgcagaataatagagttcagaaaaagatccacatatatgtggtcagctgattttgaacagatgtgccaagacaattaaatggggaaggaaactagaatctgtagtacaatattgaacagaagtgctgagaggaatatactaggtattggggaaacgtgggaatkttttcaccatagaggatgtttaaaatgaaaagaatgattataattgcttccttctctcttaacttccttccctcagacatctacatcggtgaatgaaatagcaacaataaaaataaaacaaagacttgcaaattttagttcatgcttttatttttcaaatttaagcatagattatacatattcggccgaaatatcctgattccttatgaacctaaatgattttcatgataattatctctgaacctttgtttcttcatatgaaataaaaggtttttgtgtatgttatataagataatatatacttgttatataagaartacagtgtacattcatcttccttccttccttccytccctccctccctccttccttccttccttccttccctccctccctccctccttccttccttccttttttgagactgtgtcactgtgtcacccaggctggagggcagtggcgtgttcttggctcactgcagcctccatctcctgggtttgaggaattctctgcctcagcctcccgagtagctgggatacaggcgtccactaccacacctggctaatttttgtatttttagtagagacggggtttcaccatgttggccaggctggtcttgaactcctgacctcgtgatccacccgtctgggcctcccaaagtgctgggaatacaggtgtgagccactgcgccyggcctgtacatgttctttcattttcttctgctacaatcaagacacgctgtccattttatgtagctagctcactgtcagcaagtttgcgagttctttatgtcagactaagtctacttttctataactacaacttatcaataggttttgtcccctttctatacacacaaacacaaaaacaaaacaaaagaactagagtaagtttaattcctatttcatgtaccagcccttcagatgayttaaagatagccattgtgacactcctaaatttctcttccaggctattatgttccttggccattcaggttgtgctctggatgtaatataggtttttaagaattgtctagttgttacagtgagtatgattattgaaatgtgrtctgcttaccacagaagaaatatttagaattgtggcactgtttcagtcctgtgcttttattattgcaaactaagattgcattcacattcttgcaatctggcattttgctggaatttgctgagttgataattgatatttgccagttgctgttaagccaggtatagttacattttaaacttaaatgtgggttaactcattcctcttacaataatcttaattcattttagttcattgttctgcctgttaatttttttgttcgaatctttgtattttctaataaatgcatattatgtatgtcatctggaaattgatgagtcttaaagttttggttacagtacgtttgcttatataatgtttaactgaatcagagcaagtacagaaatctggagtatatgagacagacttccttttgactaacagttgccagtagtagtcttttaggcctgcgcaattgctgcaaatccccataactaatatacagtagatatggctttgcattgttggctaggatgatatgagagacactcaaatgtcttgccaaattctagatatgcttaatttatggagtccccaaataactatgctaataaccttattgagaaaaaaaaaatgaggttaatctggtgtggcttctgaaagccttgttggggaccctggaacacttgtttttcttcttctgcaaggactcacaattccctgcataataaacagatttaacttttgctggggatcaacatctaatttgctgatacagctttttaaaaatctgtgccttttaaaaatttgagacatctcgtttctggtattttggtaaccccaacctatcttaccaacttcacaaagattatagtagtgtgcacttacacctctgtggagaaggagctgttcagactcagaattagtcaaagtaattcaaagaaccttagtgctgtctctatgtacttacctgtctcagattttaaacttttgttattatttagtcttatgatttattttaataccacagaatacatttgacacacagcaatcttcttgggcctcatagtgaagtaataacgatcagagctacagcacaaattacttaygactatatgacattcacaatatacatcaaaacccagaacacataaaccatgtgtatcaatagctgctggttttattggaacattttaacgattgatcattaaccatatatttacatataaattttcctggagatttttttatattcaaaattagacccttagtataatgaatacatcgccacacaggattgattgtgctctgaaattttgatttgggtaattttaacatgaaattgtataaacaactgatattaaatcttaaactaatgtgtgaaattataaaatagacctaagggagtttttttgaatcatccttatccttatgttttcttttctgaggcatagtttttttttttttttttttaaagtccttatttttaggacaatgggatataractgaagttmaggccaaatctctaagtacaggtgaaacaaagatttacagataattttgtttttatttagcagagctgtcagaagatgacctgttgagtcagtattctctttcatttaygaagaagaccaagaaaaatagctctgaaggcaataaatcattgagcttttctgaartgtttgtgcctgacctggtaaatggacctactaacaaaaagagtgtaagcactccacctaggacgagaaataaatttgcaacatttttacaaaggaaaaatgaagaaagtggtgcagttgtggttccagggaccagaagcaggtatagttatgtctccagaatgttgattgtctgttgtattatgtactctgttggtatttattttgtctttttttagaattaatttatttattrtactttaagttctggggtacatgtgcagaacgtgcagttttgttacatrggtatacatgtgccatggtgatttgctgcacccatcaacccgtcacctccattaggtatttctcctaatgttatccctcccctagccccctaccctgccacaggccggggtgtgtgatgttcccctccttgtgtccatgtactctcattgttcaactcccatttatgagcgagaacatgtggtgtttggttttctgttcgtgtattagtttgctgagaatgatggtttccagcctcatccatgtccctgcaaaggacatgaactcatcgttttttatgactgcatagtattacatggtgtatatgtgccacattttctatacccagcctatcattgatgggcatttgggttggttccaagtctttgctattgtgaatagtgctgcaataaacatacgtatgcatgtgtctttatagtagaatgatttataatcctttgggtatatacccagtaatgggattgctgggtcaaatggtatttctggttctagatccttgaggagtygccacactgtcttccacaatggttgaattaattcacactcccaccaacagtgtaaaagcattcctatttctccacatcctctccagcatctgttgtttcctgactttttaatgattgccattctaactgacgtgagatggtaactcattgtgggtttttttttttatactttaagttctagggtacatgtgtacaacgtgcaggtttgtcacatatgtatacatgtgccatgttggtgtgctgcacccattaactcatcatttaacattaggtatatctcctaatgctatccctcctccctccccccaattgtggttttgatttgcatttctctaatggccagtgatgatgagccttgaataaacattgagtctagagggaagcaggtgtagaacctgccttaatctgattactgtcttatcatgtattgtcttagttctgacataaacccctttaacttctagtactttcgtaatctctccgtacagaatcagaataaaagaggattgtagcccctattattaattttgctttacagaaattgtttttttggggagttcccttccccctcttttttttctacttttttgttttctttgagggcttcatacaattttgcaaagtattttcagaaatatattctaatgtagatgactgtggagctgtaatattaattgagaacctgatgccatgctaggtgctatagttcaaaaatgagaaagacagtttttgtttttcagaagcttgtagtccagttggaaaaataaatacataaaaatctttccatacagtatggtgagtacagagataaaggcatgaatacggtgttttgagggcgttcaaggggcatctaatgctggggcaatggttggaaagggtaagarggaagggatgagtgttgggtgtccctgcctaggtttaaatgacaggtgaagcaggcaaagaccggcaccaagtaccttcccagtacagtcagacagcttgaggaaaggtgtaaagatggggggcagcatggggctcaggacaactccttgctgtctgtcagtgctgtgatgacctctgtcagaattcaagctggggaaagatgggtggtgaggggagcagaaataggcaggagaccattcactgaaggcttgtatgccaacgtgggaacttttagtcttctttagaggcgatagaaacattgagagggtcgccgggcacgatggctcatgcctataatcccagcactttgggaggccaagtgggtggatcacctgaggtcaggagtttgagactagcctggatgaaatggggaaaccccgtccttcctaaaagtacaaaacctagctggacatggtggtgtgcacctgtagtcccagctacttgggaggctgagacacgagaattgcttgaacccgggaggaggttgcagtgaaccatcatgccactgcagtccagccagggtgagacagtgcaagactccgcctccaggaaaaatagaaaagaaaagaaactttgagagggttttaatcrggggaggtggtgtatgatttgatctctgttttagatcaaccattctgagcgccctgtgaagagtgggctgaagagggccacagatggggcacaaggaccagttgggctgttgccatagtccctgggagcaatcatgagattgtgaagagtcagtttaatttgtggattaggaatttagaacctggagtcaggcttcctggaatcttgttgtgttcattgtgagatgtgtgacttgacaagttaacttctggatacttcagttytctccttttaaaaattgggactaacaattataacagccttagggccgatgaaaggattaaatgagttactatcagtaatgcacctaaagcagtgccttatagatagatgataaacatacagtaagtaactcstattatgttgactttagatggtggtgccacaacatgaaaaaggaaatgtaagtgtcagaagtgatctaggcatgatagagtaacactaagagagaaaagttaccagctcctgtattccactagaagacttcgaatgaatagtctttgtttttcaagttttttatttttttatttttatttttacttgagacagaattccactcttgttgcccaggctggagtacagtggcgccatctcggctcactgccacctccgcctcccgggttcaagtgattctcctgcctcagcctcccgagtagctgggactacaggcacccgccaccatgcccagctaatttttatgtttttagaagaaatggggtttcaccattttggccaggctggtgtcgaactcctgacctcaagtggtccatacaccttgtcctcccaaagtgctgggattacaggcgtgagtcaccacactctgccctgtttttcaagtttaataaatcaggcagcagtcagctttgtctaaccatgatgatgggagaagagcatgaaagaatgaaccactggtagtttcttagtctcacctcrggtgatgtttcaaacccttctcccatggagtcttctcaaggaaacagttgcaatacaatatgattaaatgatagttttgattcgtcttttgctagtcacccttgttaaaggtgcttgttaacagtggaatgatgaaaaattggccacaaaactggaacagtgttctagataatatacactgattgggccggccatggtggttcatgcctttaatcccagcactttgggaggccaaggcggtcggatcatgaggtcaggagatcgagaccatcctggctaacatggtgaaaccccatctctactaaaagtacaaaaaattagctgggcatggtggcgggcgctagtagtcccagctgtttgggaggctgaggcaggagaatcgcttgaacccgggaggcggaggttgcagtgagccaagatcacgccactgcactccagcctgggtgacaaagcgagacttcgtctcaaaaaaagaaaaaaatacactgattaaaaagttctagaaagttgacttctctcacttggaacagtttttctagcttggttttgtttttccgctggggtgagagtagagtgtccctgtgctgctgcttcatgttgagctcttctttggagacaacaaatgagaatgtttgtgtgtctctacagggctcgcctatttagtcattrtagaagcttaaggaagtcttcaagtttgagactgtacatcgctgctttatgtagtttagatgtttcactagtaacttgttcagagggtgcattaagagatacctagagaaataatttgttttctctgtcagctttctgtgagaaataattatcaggagtaagtcagtctttgatgtgtcattttatggcttacattatacagcaacatctgataatgactagacagggtataggctcacacctataatctcagcactctgggaggccgaggagggtggatcacctgaggtcaggagtttgagaccagcctggccaacatagtgaaaccccgtctctactaagtattcaaaaattagctgggcgtagtggcagatgcctgtaatcccarcttctcggggggccragggaggagaatagcttgaayccaggaggaggaggttgcagagagttgagatcgcacccctgcactccagcctgggtgacagagcgagactccatctcaaaaaaaatttctttttaaattaactggatattattaaattagttttcaaagttaattttcaaggtaattttacatgtttttctatttcycacaacaatattatgagatacataggattgctgctatcttctctatttgaggttaagagattgaggctctgagaggttaagcmttctcaaagttgtacagttagtactggtgataggaagattccyagtcacagktgatataatggattggaagcrgcatacaatccaataggcctggatttgaattctcactctgtcatctttttagttgagtcgtctttcacacactgttcacctccctgagcctatttgtttataaaaaatggatgattatatacataaggctgttgtgaaggtaaatagaaactgcgtgtcaagcacctgccataatgcctagtcattaatatatgtgcaagcattcattaccactcctctccttttaattgaatgcaactaaaaggagatactaaacatgtaaaacgttgtcaccaatttgcctgcattttggaagcctgttttaagtcttaattatttttattatgtaggtagttatcacagaaacgtgccagttttatctttcgagatctggaaatacaagtcaattaagtaacagtatgggccagttgggaggaagtagccatgaactgggaagggttctgagttwtacttctgtttgttgctagccaagtaattttataaccctgggcattgtcactatctcttctcttgcctgtgaaatgatatgtaggagaatacttgggcatcataggaattgccgttgatttaaaaatgaatttgccgtcctatctaggagctcatgttttctgcttactgaaaagcctagtaagagcttttcttccaygtactgcttcctgccccctccccatacaactaatctagggatttggtgaaaggatagaaaggatttttactctctagcatttagtaaatattctgttcattatcttggatttgaactaatgcctattaaggaggtaaattctctttaagttttttatttatctgatcatgtataataggatatttgttaaacctaaaaactctctttgcctcctcaataatgatactgatctttcattttcattggaatttttttttaaagctgctatactgaataagtaatacctctttagtaatatggaatttatgattgatttgaaagaaagtcttaacctgtatatttaaaagagtatagaagtttatagggtatataacaagctggtagattagtatactactgcaagttcctagatgatataatgctaggaacaaagctaagatgaagggtaaatagctaatttctttaattttgcttcctacaaaatatgagagaatagttgtcaattgtccttttggttgcatatttctatatcttttcatgcgtttgaccatgttttagccccatcctaggtactgtggaagatacaaagacatgggaagtacctgccctcacagagtttatcttctatttgagagtttaaaagtttagggaaagaacacctatatgatgattaggtataaataaagtacagaagttccaaatacatgtgtatatagaagactgcttttagaaagtcctctctaggccgggcgctgtggctcacgcctgtaatcccaacactttgtgaggccaaggcgggcggatcacctgagatcaggagtttgagaccagcctgaccaacatggagaaaccccgtctctactaaaaatacaaaattagccagcatggtggcgcatgcctgtaatcccacctactcaggaggctgaggcaggagaattgcttgaacccggggggcggaggttgcagtgagccaagatcccgccactgcactccagcctggtgacagagagagactctgtctcaaaaaaaaaaaaaaagaaggaaaatcctgtctaaaaattcatcgtataaatagaattctaaatgtgtgaatgttggcataatcaaaatttgaattttgactaaaatttaagattttttatgcctttatgaaattatntatttatgagacttttttcaaaaagaaactgattattccattttgaatcttgacaccccttgagaaaactctaaaatactcatacttacttattgtttctattgctttttttattaggtttttttgcagttcagattctactgactgtgtatcaaacaaagtgagcatccagcctctggatgaaactgctgtcacagataaagagaacaatctgcatgaatcagagtatggagaccaagaaggcaagagactggttgacacagatgtagcacgtaattcaagtgatgacattccgaataatcatattccaggtgatcatattccagacaaggcaacagtgtttacagatgaagagtcctactcttttragagcagcaaatttacaaggaccatttcaccacccactttgggaacactaagaagttgttttrgttggtctggaggtcttggagatttttcaagaacgccgagcccctctccaagcacagcattgcagcagttccgaagaaagagcgattccbccacctctttgcctgagaataatatgtctgatgtgtcgcagttaaagagcgaggagtccagtgacgatgagtctcatcccttacgagaagrggcatgttcttcacagtcccaggaaagtggagaattctcactgcagagttcaaatgcatcaaagctttctcagtgctctagtaaggactctgattcagaggtaagtcaaatcctgaaggctttgttttcaaatttatatgtaagraaaaatagattgttgctcaaactgaggaaatttttcctacatgtgaatgacgagctatattattttttcattctaaactctactgtgcagaaagttcacattttattcatttgaaggacttctctgtatctttcacattttaaactgcaatacatttaaattaactctgtatatttcctgaatcactgtatgttcrattggtgagtatctcaaggggtgccacagttaaaaccgaggcagagtgataatctgtgaaatgaaaaattattatcaatttactgtttaaatccttaatatgctcttgaattcagataacatttaagaccttgtaaggggccaggtgcgatggctcatgcctgtaatcccagcactttgggaggccgaggcgagcggatcacttgaggtcaggagtttgagaccagcctggccagcatggtgaaaccctgtctctcctaaaaatacaaaaatcttaggcaggcatggtggtgggcacctgtgatcccagctattcgggaggctgaggcagggtaattatttgaacctgggaggcrgaggttgcagtgagccgagattgagccactgtactccagcctgggggacagagcaagactgtctcaaaaaaaaaaaaagaaaaaaaaagagaccttataaggaaataaccctgttaatgcaatggtattcatcttaagttttagtacttcagaaatatattttcatttactcttcttattccttctaaatttctccttatgacaaaacaaaacagtaayacaggtgtgcatactggtctagaagactgtctgtttctcttcctatgaacgtctttatctcgtctttttcatttctgcttcatactgcatcttctcttactgccacttgggtaccacggcagtggctatcttgaacatctttcataaaaacatcactgtcaatttgtgaggatattaagtctgctgagctcctttggggttatcttttttatatttccagcatgcatcttactatttcatttactttggaagcgtttagccatgttttcctgagaagccttatcagttcacactgtaggctggtagaactccacattttgtcttctgggctaacctttttttatgtactaatggttatagaaatgtgaatcctcctcccctagcyatgccccactgaaaataaacgaactraacaaaactaggaataattcattaagtcctctctcttgctgccagatgtagtaaactcctactagaatagttaattctcaaagaatctgatgctgacagttgacatgaaaatcatataatctttctttgatggagaaaatgtttcagaaagctgtgaaacattggggcatcattttgaatatcagtttttatcctatagttcagaagaaaatgcttcaatatttgagccttctgtcggtagttcactgtgaaaaacaacaaccatagattctgtgttgagttcattgaccatatttgaggttgaagtcttcttaggaccttccttgtgatcttcaggaagtgatttagcccagagtcaccaatactgttagctatgagcaaagaatgttagagtttctgtaaggtataatacaagttaatggagtgcttttcactattgggttttttattgctcttttkttttgttttgtttttttgttttttaagtctgctctgttgcctaggctggattgcagtggtacaatctcggctcactgcaacctccacctcccgggttcaagcgattctcccacctcagcctcccaagtagctgggacaacaggcatgtgccaccatgcccggctaatttttgtatttttagtagagacaggatttcaccatgttggccaggctggtcttgaactcctgacctcaagtgatctacccacccaccttggcctcccaaagtgctgggattacaggcatgagccaccgcccctggccttactgtcctcttttatttgactttcatgggaatgcagattataagggaactctccatctatagagaagtcttatctgatagaattgggggcagaaaggtctgaaagtcattgctaaaggtgaagtgcatttaatacaatgctactccacttgaaagtggatgcgtttttttctttttaaagttgaacgtgttacatgattaaaagaagggatggagctgcaccagttcaacttattttagctagtaagatgaaaacttaaccacacgtgcgtaacgcagcgtttttacaktaggagactcttgttttatctgactcagcattttracatcctcttctaacagttcagaaaagactttaattttaaatagatattttatataatttacctctccagctgaaacatcttgttagcttcttcaatgaaattggcaaatatcatcctttccatattattcattttcttttattaattctatcccatgttcttatttatcttccattttgttgaatattagtttgttgtcataaaaattctacagtaaaaatctaattttattttattttttgatctggggactctaggaatctgattgcaatattaagttacttgacagtcaaagtgaccagacctccaagctangtttatcwcatttctcaaaaaaagacacacctctaaggaacaaggtaaaacatttatttawttttttttttaatttcagaagcggtgtatgcttacaactagaaaatgagaaatacaagcagaattaaaaatcaaaatacctgtagtctcatttatataaaaatgtctactttaaaactttatgcttgactgtaggtgtttaagttgtgaaacttattttctcttgcagtgtatatgaaagatcactttccaagtacttttagtcattaatgtaatgactttataatatgcagttgtataggtttggtcaatccccttatttttgtcatttaycctaaatttttttgctctagcaaataatactgcaaccaagatcttgtggataaatatttgaggacatgttcttgattagtttgtaaggatgaattgcatggagtggtattactggtcccaaggcatgtatgatttaacattgatacatactgccaaaaggccttctagaaactgtgtacccatgataaactaggtttgttraatcaaaatatataaatatttgtgttactacatagtaaagcatrttttatatattaagcacgaattaaagcatattttatrtattaaatgttcttgttcatcagtataaaaacaccatttcctaacttaaaagatggataaaggtcataaacaggtcacaaaaggaraagtrccaatggttgattaatatrtgtttaacctcatttgtttaaccrtatgtttaacctcattagtaatcaagtagtgcaaattaaaataataaaatagtttcttgcctcttcatatttcaaaaaaatgtttttaattatactcattttttatgagagtatagtgagataatcacatgttttaaaaagtaagtattggtctgccatttctagaaaaaaatttgaaagagttcaaataatttaaaccagtaagtgcattctagaactttagcctaaggaaacattgagaatttaaatacaagaatacttaatactgcattggttataatagtgaaaaawtggaaataacctaaataacaataagggagtgagttattaaataatcattggttttagctcttactggtagaaatataggtgaayttttttctgttctttttcttgtgtttttctaccatgagcatatattatgtttctagtagcataaaaacttcttactttttaaaattttaataaatggccctgsctatccatttgaaagaagatgtagtctcacacaatataaatgtaaattctactgtagtcaatatgggttgctataacagaataccagaaactggatttgcttaaatgataaatatttatttctcacagttctagaggctgggaagtccaaggtctgagtgagagcccacttcctggtttgcagacagatgccttctckctgtgtccttacatggtagagggagagaatatctcttttgtacctcttcttaagggcactaatctcattcatgagggctctactctcatgatctaatcacctctcaaaaatcccaccatcacattaggagttaaggggttaggacttcaatatgaatgtgagggagacacaacattcagtccacagcaaattccagtacattaaagatacaaatatgaaatatgtaaatatgagattattttttaaatttttgagcaagaagttttttgcaatcatatctactaacttgaaaagacattcattattagtgaaaaggaaaaatatgttattaacratatgtatagtggtgtttttgtttaaatactttaaaatattcatgtacacatttgcatgtttgtggcatcmtattaagaagtctggaaagatacatgcagaattatttacaatgatggatagaactggagatgtagaaagtacttttcctgaaggagttatgtctagatagtaaaccatcatattattattatwattctcagacatttgcattgtcagggatttaactaccacttctgttttggtgacccttcaggtgagctctccctgatacccatctttaatacctaaaatcaaactcgtgtcttttacctctrtttcttctcggaacgttttttgttttatctattaaataaaattatattatctgccacttagtttcaaaatcctaaggttgtcctttttcttgataactgtcagtttgatccttctacagcagttagagaaaaacaaccaaacatcgatacctctccaaattctaacgtttatttctttgccttcttttttctccctcactttttccccatcacaacacatatttaaggatttcatctttactgtgtgaacctttattttgttttaactttttcattcttcctacacacactgccagattcatattgtaaaccttttttaatatacctcattcttactatcttaagaaacaataacaaaacttcattgtctccattctgtccacagggtaaaaatcaacccttagtagaaacagcctaaatgtcaatagaggtttgtttaagtaagttatggcatatatrtacaatgcaagaacaggcaacctattcaaaataaaattctatttcctgtgaactgaaaaaaatctctaagttacatcattaagaggaatcaagatatattaagtgagaaaaatgaagtgcacaacaatgtgtactatgctgcctgtgtgtgtgtgtgtgtgtgtgtgtgyacgygcacgtgcacgtaagtcagtggatgcayaggaagctgggagcagcaattgcctctggaaagggaggcagcgagagasattcattttgctctctgttcctttacaaaagagagaacttttaaattttatgccaggtttacatattacctgttaaaataatttatgatgacttctgtaatagacttttataaatagcacatttttaccattgctcatgggttattttgttcttatgtataaagaatagtttggccgtgtgtggtggctcatgcctgtaatcccagcgctttgggaggctgaggcgagcagatcacaaggtcaggagatcgagaccatcctggctaaaacggtgaaacgccgtctctactaaaaatataaaaaattagcsaggcgtggtggcgggtgcctgtagtcccagctactcgggaggctgaggcaggagaatggcgtcaacccgggaggtggagcttgcagtgagccgagatcrcaccactgcactccagactgggcgacagagtgagagtccatctcaaaaagtaaataaawaaataaataaataaataaataagtaaagaataaagaatagcttgaaattaaagttagttgctttaacagaatggtcttaaaatgggtgtttaatcttcaggttcctgggctatataagtccagttctgcagactctctttctacaaccaagatcaaacytctagracctgccagagccagtgggctgagcaagaagcyggcaagcatccagaagagaaagcatcataatgccgagaacaagccggggttacagatcaaactcaatgagctctggaaaaactttggatttaaaaagtgagttgccttgtttcttattctgaaacaagataaactgttattttctgtaatttccatccctttctcccaactcttcctagtttcgtatgagtttttgtttctctcactataaaataattatttttctctcttycctttagctaactctttatacttaatatcaatttctataccttcttttcataaaaagatggcaaactaaaaaccagttttcagtctggttttggagtctctctgatgtgaagcaaattgctttcctaggccttaagtctcctgccttccttttcttatctctcaggattgtaaagagaataaaattttatttggttttttgttttttgttttttktttttttgagagagttttgctcttgttacccaggctggaatgcaatggtgcgatctccactcaccgcaacctccgccacctgggctcaagcaattcttctgcctcagcctcccgagtagctgggattacaggcatgcaccaccacgcctggctaattttgtatctttaatagacacgaggtttctccatgttggtcaggctagtctcgaactcccaacctcaggtgatccacccgccacggcctcccaagtgctgggattacaggcgtaagccaccacgcccagacaagaataaaattttaaagaaggggtagaaacacagtgcaatatcgtacttctctaatttatcacatctaaaatggggagactcattgagtttatatgatgaatttgccagatttgcagtgtatgtggccagcactgttttaaaagaattcatcttctatatagttaaatttttgttaaccataatacttccttctsttagaccacaaaattagccacagagtagcattaccttatagctattttcttgttctcaataaaagaaatgtgctgtttaataaaagttttttttaattatatggaatgataggattaaaccttacctagtagaaatattgtcatagatgaggcggtatgagtgggaaacactttgtaaataagtaagtgctggacaatcrtttcttattttacattgtgtaaagtctaggattaaaccatatgacagcagttttcaaactttttcttttcaggaatgctttatactcttagaaattattaaaggccccaaaatactttggtttatktaggttatatttgtcaacacttaaccatcatagaaattgaaatagacattttaaaatatctattttaaaataatgataagcctattacatgaatgtagatagtacatttaaaaaataaatagctatattttccaaatccccccaaaagstaagaaaagtggcatggctttacatttcattttgcaaatctttactatctagtttgcaaatctttactrtctggcttaatagarctcagccggattcttgtatctgcttctacatttgatctgttatgatttggtgttttggttgagtatatgaaggaaatagacatatttgtagttagaaaatatatactttgatagcctttttagatagtggtaaattttcttctttgctgttatgtctaaatccaacaacttgtagtttcyttaggtcagtgatagtgtagaatatgaaaccatatcaactgactttttgtactctgtgttttattgcagtccactggtgtcccttttttctgttgcctaggctggaatggcacaatcatggctcactgtaccctcgagctcctgagctcaggcagtcctcctgcctcagcctcttgagtagctgggactacaggcttgtgccaccagccccagttaattatttaagttgttatgtgaggtgtgagccaccttgcctggcctacactggtgcacttttaatgcatcttttacatgtaacatcatgagttggtcttttggaaaatattggttaattgagatgtacttccraatattgatatattttattatacaatataagaaaaaagtcacaatcaacaaagcctttaatattggaaaactgttgtgtggcagatacgttttccaaaattttaattttcatttgaaagcttgaattttatcattagcaacaaatactcttagttgtttttctttaaagtaacaggctctctttgytcattttatttgtttgtttatttatttatttattttgagacagagtctctctttgtcacccaggctggagtgcagtggcacaatctcagctcactgcagcctccgcctcctgggttcaagtgattcacctgtctcagcctcctaagtaggtgggattacaggcgcctgccaccatgccttactaatttttatattttttgtagagatcgggtttcgctgtgttggccaggctggttttgaactcctgacctcaagtgatccacctgcttcaacctcccaaagtgctgggattacagacatgagccaccacgcctggcccctttttgttccaaattttagagaagtcctgaatgaccttagtgtcacacatgcttttacttgaggtaaactatcatacttccatacacaatagaagtgttttgtttgtgctttccattttgtcacagaatattaaaaagtataccaaagaattagctgagcgtggtggcatgtggccgtagtcccagcttctcaggaggctgaagtggcagaattgcttgagcccgggaggtggcggttgcagtgaactgagattgcggcactgcactccagccagagtgcaacagaacgagaccttgtctcaaaaaaatttaaaaaaaaatgtaaagtataccaaagggttgagatttaataaaattaatgatttgtactgcttccatcaagaacatttttgagacttttttttaactgcaagtgcgcagaggtggagaatacaaatagtcctggtatgactcgtacggtgtgatgccactgtcttgattcacactgagttgtcagcagtttcactctgttctgctttagcaacatccatgcaagggtcagcacagtggaaaggatgaacaaagtctgaatattgtaagaatagttttggtcttggaaaccgttsaaaggatcttgggactctccaggggttgtggaacatgctttgaaaactgttgctagacagaaattaagggtgcaacagtattcttaaatacctttgagaaaaagragatgtactggtatttaatttttgttgacaggagatagaattacctgtaatatcttcataacaggattaatttttatagatagcttccttccagaaaagaaaaaagagaaaacaaccgagaggggaataaaagacagggcttaggccaggcacagtggctcacgcctgtaatcccagcactttgggaggctgaggcaggcagatcacttgaggtcaggagtttgagaccagcctggccagcatggtgaaaccccatctgtagtaaaaatacaaaaattagccaggtgtggtggtgcacgcctgtagttccagctactcgggctgaggcaagataatcgcttgaacccaggaggtggaggttgcagtgagccaagatcgtgccactgcactccagcctgggtgacagagcgagaccatctcaaaaaagaaaaaaaawaataataagatttaaccagggcttaaccatttgttcctgcttcacttatattagttcttaaccagacttgagaagggcactaaggagaaaagaattaaagtattggaatcattctgccttagctaatatatctagtggtggcccagcacctacactgaatagtgattttgaaagcaagaagaggcactaagaagtgagactcagaatgtattgggagtgctcacaggagaaccngattgtgttatataatgaattgaaagagatcgtacagtaaagggtcttatcctcttcatgtccstctattttgtccaggtagaatatttcttctctaataatcagtaccttaaaaataccaaatgtattttattgtattttgcagagattctgaaaagcttcctccttgtaagaaacccctgtccccagtcagagataacatccaactaactccagaagyggaagaggatatatttaacaaacctgaatgtggccgtgttcaaagagcaatattccagtaaatgcagactgctgcaaagcttttgcctgcaagagaatctgatcaatttgaagtccctgtttgggaatgaggcacttatcagcatgaagaattttttctcattctgtgccattttaaaaatagaatacattttgtatattractttataattgggttgtggtttttttgctcagctttttatatttttataagaagctaaatagaagaataattgtatctctgacaggtttttggaggttttagtgttaattgggaaaatcctctggagtttataaaagtctactctaaatatttctgtaatgttgtcaagtagaaagatagtaaatggagaaactacaatcctagaggaaatcactgtgtttctccaggctttaaagttttccacttgcctttcccatctgtccttcagggttgaattgaaaataaagttgttgagatgggaggggtaattggaagggttaaagatcattacacaaatgagacagtgctctcttatccctgaagggtttggttggattataggttgacactgaaggaaaattttcagcctcatatgaaaggaaatacttcttatatcattaatatttttaaacttcaaaatagcctcagttttaatatatatattttgaagtataggctaaagctttcttaacatgtatttaaaactagtcccctaaacactacataagatactaaagctgcaaggtctgtgacacgtacactctgcaaataaatgggcagatacctggaaagagaaccagctgcacaagtgaggatctgaagtgacaggaattaaaggaattataaaagtatttgtgatatagaggataaaggaaagagagccaaagtatttatatttttgagtgagacttggtagaggactctaggaaaatgagatcagaatggaataaaagctaactaaagctattacaaaattaaaacccaaaaaggcccaatctggaaaagacctaatccaaagaacaaaagcagatttgaattctccatgcatgtttcctgttataaaataaattaggaatgtgagtcaaacgttgtctacaaatatttatcccctcactcactaaaaatgctacttaaatgacagaaaaggaataagacaaatccacaaggttaatagaatggaagaagagacatcaggcaaggaaactgatggatgagtggtaagtgatttcacaaagaaatgataattgtcagtggcagaagactagaagaggtaaaaatctaataagcttgacaaatggagatatccagattcctctaaagccagaggtgcagaataaggctggaaataggattggttttggaaatctttaaaactagtgtgggagaaagggcagatggcagcagtgccatagttttcaatctccaaatcaccatataatagcaactggatagcaaaataaaaatccatgagcaacgtaagtgggtgaagatagccacaagaccacaagctggcattggcatcaattcaggtgaagcagagtgaggaaacggcatctaatggcctgagaacagaacctcagggtcatcacagaaacagcaggccaggttgaaaacagcactcaagtgggagaggctttgcccatttcaaaggtgggtgagtccaagaggcttgtattaaggtctgaaggactgaagcaagctagcccctagaaagtgttagaactgattcgctgagttcaccaaggttctcttccaggacagcgttccccacagaagagaaactgctggggtgaagccaaattgaagaagagaaagatgaagagaaggtccaaatacaagtagaataggggatagtcaaccaaaatctctcagcagaatactggttttgaacacttagaaagaaacagggaagttcccgtgaatcatgcttccttctcaaagtttaggaaatggaatttacttaagaaactaaggaaagtttttagatgaatctcatacaaagttattttaatgaaaagaaagagcaaagataagatttctgggcaatgaagatctatcagaaaggtctacagagcagagcaaaactagttcgtttaaaatgtgctaaaagatattagaaaaatgatataaaatatgacaaatttaggattacaagaatcagaaataagataaactcaggaaaacactggaaataaaaagataccagagatgcaatataaacactatggataattcctttaaaaagaggtaaaaataaaaaggaatttaaaaaacccaatttttgtttaattagaaaatgacaaggcccaacatacagataataggaatttgaaacaacaacaaaaccctataatcttagaaaatgttttatttaaatatataaaacaatattttaaaagtgaactgtggtacctaagcagcagctaacaccaggacataaataatataatactttaaagggagaaaactttttggctaggcaaaaccaggtgaaatgaaagatggtgatcagactttcttcacaattatactttatgcctgaagaaaatggattgaccattttcgagatacccaaagaaaaatgtgagctgaggttttcatatctaataaagttataagcataaaaggctggtacaaacttatcctacatagaaaaatttgggaaatgggaaatgttgttcccttaagctcttcatcaggaacatcagaaaatgagctccagataaccacaatgactaaagaaatagtgacagactggtggtgaatattaagcatgtgttgcttatataatttaagagttaaagtatagtatgtaaaagcatatgcaaaaacatttggtttagctggtggtagtctgatattttgggactgtgtgtagactggaatagaataattactatttataggatatttgaaatcctgttttcttgagaatcagggtcctttttttttttttttcaagatggagtctcgctgtgtcacaatctcagctcactgcaacctctgcctcccaggttcaagcaattctgcctcagcctcccaaggagctgagattacaggtgtgtgccaccatgcccagcttcatttttgtatttttagtagagatggagtttcaacatgttggccaggctggtctcttaatctcaggtgatccacccaccttggcctcccagagtgctgggattgcaggcataagccactgcacccagcctagaaccagggattttaatgtgaggaaaaggagatagagaatacagaacatgtaattttttgaaaaaaataaaaaacaaacaaaaaaaaaaaacctatggctatgaatttgaattggacgtagtggtataaactcatgaatgtatatgaatacatgtagatatgtgtgaatatacacattcatgagtttgtaccagtatgttcaatacaaattcataactatcaggatgcttaacacgtcagcttgtggtttcaaagtacctttttgtttttttcattaaaacgagaatttggggaaaatagtctggcaggaagtgtaaaagataagcctaggacatcttgtcacaacaaatagaggggctgggtgcagtgtctcatgcctgtaatcccaggactttgggaggctaaggtgggcggatcacctgaggtcaggagttcaagaccagcctggacaacatggtgaaactccatctctactaaaaatacaaaattagccgggcgtggtggcgcatgcctgtaatcccagctacttgggaggctgaagcaggagacttacttgaaaccaggaggcagaggtttcagtgagccgagatcccgccactgcactccagcctgggcaacaagagcgaagctccatctcaaaaacaaaacaaaacaaaacaaaataaaaatagaggttaacaaaggctgctaggtaatttccaaaagattcaagagccagcttaaaggggcccccactgtgcaaatgtgggaaactttggtcttcaaagaagataattgcaatttactaaaacccatcataaacattaagaataattggtcaccttggaggatgatggagtattcattgtcttgaaaacttgaagcaaaaaagcattttcctgtctttcctctatgaacagtacaactgggtaactaaatggcagatgaaggacatatctctttctagtgttctaataattaagatcatatatttttcaatacccagtggatcaataaatttgaattttgtgcatcaattgctctaacatcacaaaaagaccaggcacagtggctcacgcctctaatcctaccactttgtgaggtcaaggagggaggattgcttgagctcaggagttcgagagcagcctgggtagcatactgagatctcatctctacaaaaaaaaaaaaaaattgtttcaattagccagatgctgtggcatgtgcctgtattcccagctacccccatggctgagatgggaggatcacttaagcccaacagattgaggctgcagtgagctgtgattgtgccactgcactccaccctggatgacagagcaagaccttgtctcaaaaaaaaagaaagacaaccagacattttatgcctgctaatgaaagggctcaacatcacctatagttttgccacagagattagaaatgagtctgattatgcctctgggttcagctgcctgctacattgcaggagattcagaggacagtggaacatgttgaactgaatgaagcatgagtgtacaactagcaaaattcagactcgggaggctcaggtgggaggatcgcttgagcccaggtggtcaaggctgcagtaagccatgattacatcactcaactccagccccggtgacagaatgagacctgtcaaaaacaaaacaaaacaaaacaaaaacaccaaacaaaaactagcaaagaaaaaactttagttgaattcttactctgttatacagaggccccatcatccttccatgctgtgtcccagataagccagtgctagcattgtggctgtccttgggccatcccatctatccttagagttcaggctacttttgccctgcaatcttagccctctaatgattttattttattttttattttttatttttttgagacgaagtctcactctgtcacccgagctggagtgcagtggcatgatcttggctcactgcaacctctgactcccaggctcaaactattcttctgcctcagcctcccaagtagctgggattacaggcacctgccaccacgcctggctaatttttgtatttttagtttcaccatgttggccaggctggtctcgaactcctgacctcaagtgatctgcccgcctcagactcccaaagtgttgggattacaggccaccgcacccagcccagccctctaatgatttaaaggaaagttatgattttgtagattatccagtttttcttgttactaatgtgagaatgaatcttttttccagcttcctccatcctaggcagaaataaagtcccaaatctttgttttttaacgggtcatagaggacccatcatcaccctttattcattccttgatcatctcaggctagagaagtctagggatacagctatatataacatgaccagaagaattaactgggccgtagcataatcacatatttgaaacaggtaagtgagtcatctgtggctagagacaagtcctggtcacttccctattctgccccaatactcaacttattacattcagatgttgcttaatggctagatgcagctttgagggtaatgcttctattaaatatgtcagttcagttttacaatggaaaattctgaagatggatggtggtgatggttgcacaatatgaaggtacttaatgccacttaatcatccccttacaattgttaagatgataaaaattatgtatattttaccccaataacaagatcttttaaggccgagcatggtgactcctgcctgtaatctcagcactttgggaggctgaggcaggcggatcacctgaggtcaggagttcaagaccagcctggccaacatggtgaaactccatctctactaaaaatacaaaattagccagacgtggtggcacgcacctgtaatcccagctacttgggaggctgagataggagaatcgcttgaacccaagagacaggcagagtttacagtgagccaagatcacaccactgcactccagcctgggctacaagagtgaaactct

SEQ ID NO: 95847 - DNA, 15225 bp, Homo sapiens
caatagtacccagtagcaatgagcataactgccacccagaccttggttactattaataaatatgatttcccacaaaaaggaaccaggttttccttggagaaattgctcatttcagatctagggtagtaaaagtagaagcagagcctggaatatcttattctgctaaaaagcaaagaattgttgaaagactaatgaggacgtttcaaaaggacacagcagtcagctcgaaggagcttttattggaaggcagctacgctcaccattataccaccaacgtggcactaaaggagctgttattggccaaagtttggacaatttgagcttcaaaaagaatatcagtgttaatggattataatactgtatctaaaagagaatccatgagttcatgaggccggaagtccagatattttaaaaggggaatatagctgacttatactgaagaatatctgctaatatataaaaaggaatcataattaaattagaaatcatcactttgtagccaacaatgtaataactaattaggaagaatcatcaatggacacaaaatcctctgagtgaaatgttggggaacatgatgttcacagcctccagttactacctccatacattactgattaattacaaatggaaaatgtgtttttacaacagacactgctttaacccagtgataaaactcagccctgctagtaattggacaacctgacatcatgtgcctcttgatggggtgcagtgggaagtacacatcatcacatatacagtgttcttgaccaaaaatgtttaacttaaatatagttatgaaaatataatgtggcaaatccagaatgtgggatatactgtaaaacaattagacagtactcttcaaaaagattcagtgttatgaaagagttaaaaatacatcaggaggccaggcgtggtggctcacacctgtaatcccagtcctttgggatgccgaggcaggtggatcacttgaggacaggagttcaagaccagcctggccaacatggcaaaaccccttctctactaagaatacaaaaattagctgggcgtggtggcatatgcctgtagtcccagctactcaggcggctaaggcacgagaatcacttgaacctgggaggcagaagttgcggtgagctgagagatagcgccattgcactccagcctaggtgacaaagcgagaccctgtctcaaaaataaataaatacatacatcaggacacttttctaggctaaaagacagtaaagagatgtgataaacaaatacaatgtgtgaatcttgattgaatcctagattttaaaaaacagctgtataagacattttgggattattagggaaatctgcatatgtactgcataatagatactattttgtatcaatgttaaatttcttgtgtatgtgttgtttgataatggttatttggattatgtagaagactcatggtggggtatttaggggtgaagtgtcatgtctgcaactttcgaatggctcagcaaaaagtgtgtgtgtgtattaagagaaagaaatcacatatggcaaaatattaacaactgcatctcggtgaagaggatatgagactcaatttctctgtaagcttaaaaattttcaaaataagttggggaaagtaataatagagaagtaaacagttcaagaaaaacaaacactattttatgcttattaaaccagttcctcccacctcactgtagtttgtgttttaaaataacttccagtgctgccaaggtcatggggaagctggtacagtgaattaccagtggcatgaccatggytcagcctgcataggccagcatgcagcaatgcttatcaaacatggaaacacttccatgctggctgaggcaggcattgccctaaggattcttttcaaggaattaggttgacaaaagtaaaaaaactatgcctgaaaactgaaaatgaaaacaacctaaatgtccagtaataagggttaggtttaggaaattttgcttcactactggatggactattatgcaagtattaaacatgggttttaagacttccaaaaaaaaaaaaaaaaagcttatggctattgcttcgttctttcaaaaaaaaaaaaaagaatgtgaaaccacgtgatttcaactttgaaaataaaagcataaatatggcaatatggctgggcacagtggctcatgcctgtaatcccagcactctgggaggccaagaagggcatgtcacttgaggtcaggagttcgagaccagcctggccaacatggtgaaaccccatctctactaaaaatacaaaaattagccaggagtggtagcacgtgcctgtagtcccagctacttgggaggctgaggcaggagaatcgctcgaacccaggaggcggaggttgcagtgagccaagatcacaccactgcattgcagcctgggcgacagagcaagactctgtctcaaaaaaaaaaaatttttttttggaaatatgacatatctttcaggaatttacatctcatattactatattaaagattaactcaaactcattttactgttgattggctaaaagtgcaagcttattttcttagcacaaatattaacatatcttcctccacaatatttccaccctaacaccaatttgggtagctctgagagagagtatagataaactgaaatacttgtggaatttcaccctcgctcatcatggcagctgaaatttaaattctgttcaagtacaatttatttctttgcccataatgtatcaatttttattttttcaattttattatttatttattttcataaggccttttcccaatgttatctatttttaaatgcatacgccagtacttctcaaagtatggtctcaggaccagctgcattagtatttcttgggaacttgtttgaaacaccagttctcagaccccacctcagaactactgagttagaaactctggaggttggatccagcaacctgtgttttaagaagacctccagctgattctgatggaggctaaagtgtgagagctactgcatgagacagtccaatggccatgcttataatactgaattcaaatgggtctcttattgcccatgaaccctgaataaaaacagctggcttagagtgttcaactgtcctggtttgcctgagactaaggagtttgcaaggatgcaggacaaggtgtgcagccatcaccactatctaattcaagaacatttcatcaccccaaaagagaagctccagcattctctagcagtcactcaccatcccgcctctcccagcccttagcaaccactaatcaactttcaacataggtactttcattctccatgtaaaagtgaggaaagggagatctagacatttttgtgacttttcttaaggttttctgatgaggctaaaccttggatttgaactcactaaatgattctctctcctttctagacatatttatgccctgtttatttcctcaagttattatattttcttgttactgtagatggggaggtgtcaaaacaaccacttgcaaactattgttgtcatgtagaaatagctggtttgttctgagagaccaattcacccagatgtgagtgctttaattttgttaaccttacactttcttaatgaaagagaatggcttttgtttacttctttacaactgaaacatacttgccctccccaggaaagaaaaaatttaaaagcccttgaaattaaccaattaaattgaaattgactttattttaaatctaaggaagaaaacaagttttagtccccttcagagccatatatcttaaatatagtaattccagtttagtctattaagcttctgatcaagatgaataaaccttatacaaaattaagacagagttcaataggaytagaaaagggaggtcagggaaaaaatgtggatattatattttgaataatttggagttcaaaccaacttggaagctttccttttagcagatattattttaataagtctaattgtctacggactgctttaatctaattctagaaaccaataaattgtaatctaattgttagatgatgaaagacagtgatttggggaaactaatgtgtttacatgcagtttttgtccaagtttagctttgtggaaagcagtcagaaatatccgatcttgactttagcggtaaaaatgcatctagggatacacacccatgtagctgggtatatgtcttcctttgtggcgtctctttatatgccagaaaatctatttcagttgagacagataataccaggcctgcacaccccaggctccagaggccctcaggggaaagagctggagaacagcaagtcccyggaacaaytggggagcctgttcacaattttggctgtgtcgctgccctgccagtctgtctgaagcatttggggaacacccagtctttgcagaagcttgaacttggccctaaagaacaaaaatgaataagaaattttccttgaagctgagaacaggggccttcactctcctgtctagtgttcctgccattcagccacatctatatcagaagaccacagctctcgagcacccagcaaacgtatgtgctgggaggaggggaaaacatagattccttcccaccccagccctggacatgctcagtcctgtggtctctctacccaccaacagttagcatgttcatcttctgttggtttcacaaaaccacggtgatggtcatgcttctgtgcctggtccagggtgttgctcagctggaagattcatacctcacttctgtgccaaactgactctctgctggtccttctagacttggcttgtgttagcctgcttggaactctctcctgatccccctcatctgcagtctcagttcagtgctctcctcagaactcctcctctagtgttcacccaattcagttttgtatcttcctattatgttaactgctgtactccattactatctttttaaaaaataatttggactcccttgttagatggtttgttcaggagctgacctatcatatttatctctgtatctccaggacctggtatcatacttggcttatagcaggtgtgatggttaacagtaagtgtcaacttgattggatggagggatacaaagtattaatcctgggtgtgcctgttttggtgttgccaaaagagattaacatttgaatcagtgggcccttaaactggtgggcacaatctaatcagcttccaacgaatataaagcaggcagaaaaacgtgaaaagaagacacgggtctagcctcccagcctacatctttctcccctgctggatgcttcctgcccttgaacatcggactccaagttcttcagttttgggactcggactggctctccttgctcctcagtttgcagacagcctattgtggggccttgtgattgtgtgagttaatacttaataaacttttatatatatatgtacatatatttatatatattgtgtatatatatgtatatatattatatatatagtatatatatgtatatattatatatatatatatatgtatatatactatatatatagtatatatatgtgtatatattatatatatagtatatatatatgtatatatatatatatatctcctattcgttctgtccctctaagagaaccctgactaatacagcaggcatttcatccattcagaaatattcactgggcatctcctgtgtgccaggtacagtgtaaggtgctgcaggtaaatagcattatagtgcttgctgaatgaacagtctctgatatagttttgatattyccccccccaaatatcacatcaaaatatgatccccaatgttggaggtggggycttatcagactggcaaccatcaccaccagtcagaggcttattagactggcaattctcaaactctataccagagaaaaacgggaactttttaaaagcacagattgtagggccctcaccccagacttaaataaaaattggggggactggagcacatgagtttggattaaattacaagtgccccagatgattctgatgtatgggatccactactcagaaaagaaatcctggccgggttgggcgattaacaggcggtggctagggaggacggagagggggcgtttgctcctctgggacttttcatgcctcgttttttttttcagatgtggcttggtctggacgcaaggtcccagcagccagcttaagcttactcttctgtgaaaggggaaagtatcccctgtggaaagcagttaaacttgtggagggggtgcgagacgtgagttctcccccatgccaggcgaatggtgtggacttgagctggtccagcagccggctcgacttgtctgagggagccctggagggggcggggaggggscccacagaacgtgggttctataaagagacattgggaagattcgattccgagaagaggaagagccggattgaaagagagccaggcccttgagggggagggggctgccaagatggcgtcggcctcctccgggccgttgtcttcggtcggtttttctccgttgatcccgcggtcccttcctgtacctcgtcctcagcatctggaatcaagagtcccatggcatctgaggtgccttatgcctctggcatgcccatcaagaaaataggccatagaagtgttgattcctcaggagggacaacctcatcagccttgaaaggtgccatccagttaggcattacccacactgtggggagcctgagtaccaaaccagagagtgatgtcctcatgcaagatttccacatggtggagagtatcttctttcccagtgaagggagcaacctgacccctgctcatcactacaatgcctttcgtttcaagacctatgcacctgttgccttccgctacttctgggagctatttggtatccggcccgatgattacttgtattccctctgcagtgagccgctgattgaactctgtagctctggagctagtggttccctgttctatgtgtccagcgacgatgagttcattgttaagacagtccgacataaagaagcggagtttctgcagaagctgcttccaggatactacataaacctcaaccagaaccctcggactttgctgcctaaattctatggactgtactgtgtgcagacaggtggcaagaacattcggattgtggtgatgaacaatcttttaccaagatcggtaaaaatgcatatcaaatatgacctcaaaggctcaacctacaggcggcgggcttcccagaaagagcgagagaagcctcttcccacatttaaagacctagacttcttacaagacatccctgatggtctttttttggatgctgacgtgcacaacgctctctgtaagaccctgcagcgtgactgtttggtgctgcagagcttcaagataatggattayagcctcttgatgtcaatccataatatagatcatgcacaacgagagcccttaagcagcgaaacacaatactcagttgatactcgaagaccagccccccaaaaggctctgtattccacagccatggaatccatccagggagaggctcgacggggtggcaccatggagaccgatgaccatatgggtggcatccctgcccggaatagtaaaggggaaaggcttctgctttatattggcatcattgacattctacagtcttacaggtttgttaagaagttggagcactcttggaaagccctgatacatgacggagacactgtctcagtgcatcgcccaggcttctatgctgaatggttccagcgcttcatgtgcaacacggtatttaagaagattcccttgaagccttctccttccaaaaaacttcggtctggctcatctttctctcagcgagcaggctccagtggcaactcctgcattacttaccagccattggtctctggggaacacaaggcacaagtgacaacaaaggcggaagtggagccaggtgttcaccttggttgtcctgatgttttacctcagactccacctttggaggaaatcagtgagggctcacctactcctgaccccagtttctcacctctagttgaagagactttgcaaatgctaactacaagtgtggacaacagtgagtatatggggaatggagacttcttacccacccggctgcaggcccagcaggatgctgtcaacacagtttgtcattcaaagacccgcagcaaccctgagaacaacgtgggccttatcacactggataatgactgtgaagtgctgaccacactcaccccagacactggccgtatcctgtccaagctacatactgtccaacccaagggcaagatcaccttctgcatgggcatccacgtggcccatctggctctgaagcaccgacaaggcaacaatcacaagatccgcatcattgcctttgtgggaaacccggtggaggacaatgagaagaatctggtgaaactggctaaatgcctcaagaaggagaaagtaaatgttgacattatcaattttggggaagaggaggtgaacacagaaaagctgacagcctttgtaaacacgttgaatggcaaagatggaaccggttctcatctggtgacagtgcctcctgggcccagtttggctgatgctctcatcagttttccgattttggctggtgaaggtggtgccatgatgggtcttggtgccagtgactttgaatttggagtagatcccagtgctgatcctgagctggccttggtccttcgtgtatttatggaagagcagcggcagcggcaggaggaggaggcccggcaggcagctgcagyttctgctgctgaggccgggattgctacractgggactgaagactcagacgatgccctgctgaagatgaccatcagccagcawgagtttggccacactgggcttcctgacctaagcagtatgactgaggaagagaagattgtttgtgccatgcagatgtccctgcagggagcagaktttggcctggcagaatcagcagacattgatgccagctcagccatggacacatcygagccagccaaggaggaggatgattacgacgtgatgcaagaccctgagttccttcagagtgtcctagagaacctcccaggtgtrgatcccaacaatgaagccattcgaaatgctgtgggctccctggcctcccaggccaccaaggacagcaagaaggacaagaaggaggaagacaagaagtgagactggagggaaagggtagctgagcctgctcaggggactgcatgggaagcacggaatatagggttagatgtgtgttatctgtaatcattacagcctaaataaagcttggcaagattttttccttctttgcttcaaaaaaaaaagaaagaaagaaagaaagaaagaaagaaagaaagaaagaaagaaaagaaaagaaaagaaaagaaatcctgatgcctaaatctgaccccttgaaatgctgatgagcttcatctgagctgtgtgatctctcatgtgcagctaaggttgagaaccactaacataaaataattcacattaaaatcaccaggaagctttaataacatttcaaatacttggacccaacccctaaagattctaatttaattggcctgggactcaggtactgatatttttcaaaagctcacaaggtaattctgaaattcagcaaaagttgagaaccactattcagactaagtgacttgtccaatgtctctgggtgcatcagactttacggccttccttacacaggggttgtgaatgaaatatggctatggaaagcaattgttgagtaatatgttataaagtatggtggtgatgatgatgatgacaatgatgacaatatttcttgagtgcgtcctatgcaccaggcactatgctaagcattttatgagcttaatcttattgaatcttcaacattagcctgctggtattattttcccttttccttgattataatatgtcatcagttgaggatgacaatttaataacagttattagaggctgttgcttgttaataggaaaatatttattcagtcctccagagacaaagatttgctttgatcagaataaatgtaaattttgatttatttaacatgaaatgcaaataaacatgtgtgctgctatcaatgcaaatcactcatcccatgtgatatcaaataagcagataccttctatgtagccctccaagttcacctacattcacaaatgttacttatatctcatactggggtatccatactgggcctggaagctggcaagtttatttagacacattccatttcaggaataataaaatgcagggaaaatgtgtatctttgagtcacagaatcatggtattattcttattttcaggtgagactttaaaagattaagtgacttgcctatagtcccagggttcattctacagccaagccagaaataacaacccagtgcccctgatgctggaattctccagaagctcctctactgacatagtttccactgacaaactttccttgacaagaataaagtagtctgtcagaacaaaattttgccagctctgtctactgccagcacttggaaataggagtcccatggggtttgcaaacaaatgaaagcagtggtgggcttgcaagacctcaccagtccttagagttcagttgatatgtctctcaatacaatgcaggaactaattttaaagcattttgaaacaagcacaataactgaaaattctgagttcaacaagaaacaaatgcatttaatctttgaagaaaaatcaagtcaattaagaaatgaaaataggttgagactagacgaataagaatggaaatgatcgattggagaagttttcagccttgaacaggccattaccaagtggtcagtatgaccacatttatctgatattatttggtccttttctttcttttaaaagtactatttagttataagaatcttaaatgctggctggtgcagtggctcatgcctgtaatctcagcacttagggagactgaggctggaggatcgcttgagctcaggagtttgaaaccaacctgggcaacatggtgagaccttatctctaccaaaagtaaaaaaaaatagttggacatcgtggcatgagcctgtagtcccagctacttgggaggctgaggtgggaggatcacttgagcctggcagatggaggctgtggtgaactgtgatcttgccaagaccgtgtctcaaaaaaaagaaagaaagaaagaaagaaagaaagaaagaaagaaagaaagaaagaaagaaagaaagaaagaaaagaaaaaagaaaattaaacaccactttttaaaaaaaagcaacaaagaaaatttggacattaagagaataaacattcccattaatcccatctccactctcctaagagatcatcagtttagtgcctgcttttccaaaaatatatgtcaaaaatgatttctctttcttaaagagaaagtatatatctatagtcttaactttccttttttttccaactatataaatatagtggccaccatacattattttaagcagaaggtaaattaaacgatccactgcgaacactttggatttcttttgtagctcccaatgtttgtttggcaagatagaaatgcccttaaatgcagccttattgtcccagctttagtaaaattctatttataaatcaaatccaaagtaaccagagacgttggcataatctttggtattctctgccggtacagagaaatctcaatttgtggtttccaacatttgtaaggtggtaaatagcaacctccctccactgttcctcccacctcaagtcagcagggtgctggtaaactggcttgggtgggagtgaggggaacccctggtgtgtcgtatttactgacttccattgggtaaatgctccatgattggctcacaaaatttcctaatatttaacaattggtgttgaactgttctaacacatcagtgtcaagccattcgatgaccaattatggcacatatatgacccttttatcttgatataacactcttgcaggcttatttcatacatgtagtcactgcacctacaagaaacgtataacagaatgaatgacccaaagccaacaactgtggggaaaagtgaattagacaacatctctctcatatttctctatttatgagaggaaattctagcatataacctccaagtatgatgaagttcttctgtagacatgtaggtatcagtattatgctaacattttttcttttcctagataaaaataaagtagcccacaagcctggttttatgttatgttaacattcattaggtattctttgcaattttcccttttgcagctattaaatcacttattccttcaatattttttcctgcataatgatttttttatagaagctaatacagtaagcattttaaagtcttaccagttgtgacattgaaataatgagactttaaagtccaaccacgtatctggaaatataggaacaccattcatttattttttagaagaccacacactcatgctaatgaggatgccattgcttaaaatgttttggaaattctctttaggaattgtttttggcacaagattatgcagtatggatgaatattagtttcactgccctaatagtggtgcttcatatttttctaattaaaattataaaatacaacctctgataaagggtaaagagcattggatgttgattcagaagatctggactcaagtttaacctctgccacctactcgttttgtactctgcatatcccttaactgctcctaacctcactttccttctctgcaatttgagaataaaagtacactcgtgcgttgcttaacagcggggatgtgttctgagaaccacattgttaggtgacttcattgttgtgtgaacatcgtagagtttacttacacagcctagatggtatagcctaccaaacacctaggctagcccctattgcttcagagctacaaacctgtacagcatgttytgaatactgtaggcaattgcagcacaatgataagtgtttgtgtatctaaacatactcagtatagaaaaggtacagtaaaaatatgtataatcaataaaaaatggtacatctgtatagggcatttattatgaatggagcctgcaggagtggaagttgctctgggtgagtcagtgagtgagtggtgagtgactgtgaaggcctaggacatgactgtacactagagtaaactataaacactgtacacttaggctacactaaatttatttttaaaaattcctttcttcaataataaattaaccttagcttactatagttttttactttataaatttttatttttattaactttttgactcgtaatcacacagcttaaaacacaaatacattgtacagttgtacaaaatattttctttatatctttattctgtgatatggttaagctttgcgttcccacccaaatctcaccttgaattgtaataatccctacgtgtcaagggcggggcgaggtagagataattgaatcatcggggcagtttcccccatactgttctcatggtagtgaaaaagtctcatggggtctgatgattttatacatgggagttcccctgcctaagctctcttgccacccccatgtaagacaagactttgctcctcattcgccttccgccatgactgtgaggcctcctcagccatgtggaactgtgagtcaattaaacctctttcttttatacattacccagtagcaggtttatctttattagcatcatgagaacagactaatacattctgtaagctttttttctatttttaatattttttattttatttaccttttaaacttttttcttaaaaactaagacacaaatacacacattagcctaccagggtcaggatcatttatatcactgtcttccgcctccacatcttgactgactggaaggccttcagggacaggaacatgcatggagctgtcgtctcctgtgatagcaatgccttcttgtccatacctcctgaaggacctgcctgaggctattttacagttctaaaaaaaaataagtagaaggagtatactttaaaataatgataaaaagtatagtatagtaaatactaggtgataagaatttttcagctccattataatcttatgggaccactgtcatatatgtggtttatcactgagtgaaatgtcattgtgtggtgcatgactgtacctgctccaggagttgtcctgaagattaaataatacaaggcattgtgataacaccttgtgaaatgaaacacgctatccaaatgaaagtcatcattggtctagcttgattagaattgaatgggcttggctatttccaaaattcagatgtattccctgaaagcataaatgttccatcatcaaaaaaagtgtagtgtaaaaagaaatatgcttggactttgtctcagttcttggctcagagctcataaagcccttggaatttcctgaatgacaggagtgtctttggttctttgcaaggagcccctttcgaacatgcctgagtttatgctaatgaggtgatttagagtgggacccagatagtgtcatgatggggccagtcaccagaaggattatagaaatttgggactttcatcccagttcacctacccctcagcaggggatgaggaatggaattcaagctgttaaaaacacatatacaccatggaatactatgcagccatacaaaatgatgagttcatgtcctttgtagggacaaggatgaaattggaaatcatcattctcagtaaactatcgcaagaacaaaaaaccaaacaccgcatattctcactcataggtgggaattgaacaatgagaacacatggacacaggaaggggaacatcacactctggggactgtggtggggtggggggagggggagggatagcattaggagatatacctaatgctagatgacgagttagtgggtgcagcgcaccagcatggcacatgtatacatatgtaactaacctgcacaatgtgcacatgtaccctaaaacttaaagtataataaaaaattaaaaaaaaaacaaactctcaaacaacaagatttgatgactttccaggtgggtgaacacatggaggtgatgggagggtgggcacctggagaaggtgtggaaactccacactcctcaccttgaactccagaccttgccctgtgtagctcttccatctggctgttcctgagctataccctgtataataaactaataaatgtaagcaaagtgtttccctgagttctgaactattctagcaaattatcaaacctggggggaggggggtcttagaaaccctcagtttatagaggattggtcagaagtaaggaaggcccgcactttcatctggcacctgaagtag

SEQ ID NO: 95848 - DNA, 64146 bp, Homo sapiens
  misc_feature (1)...(64146): n = A,T,C or G
caaactttgatctggctgacaccaaggatctgtgacacagttctgctgagaagtctgacagctgctttgctgaaaatgtttgtggctctggaccaggctcagaatcagtacaacctcatctgtcatttgtagtgtaagaagggtctgagcctcagacccaggacttgttgcctgaattcctcagctgtgcttttttctcccacacctttccacatgccaaccctggggatctgcttaactctgtttttgccccctgtggctgctgagcagaactacctctgtactttgtcctcaagcagcaaagtcccacacccaagcttttgtggaagatgccaatgataacattagcaggtgaagcccaaagacagcattttggcaaggaggtgatattgggataggataatttttcttatgaagtgtttgagggccccagtggccatcaggtctcctgatgagttggaatagaggcaaagagtcacaaatctaagtcttcctccctctttagtgagaatccacagtaggtgcttgtaatcccagctgaggcaggaggattgcttgaacccaggaggcagaggttgcaatgagccaagatctcaccactgcattccagcctgggtgacagagtgagactctgtctcaaaaaaaaaaaaaaaaaaaaaaaaaaaaaaaaaaaggaaaagatgagcctggaatatcttgctgtgccaggaagtaaggaattgcttaaggattgagggggacatgacaaaaggacacagaatccagtcattagaagataatttgagcaccaaagtaaataatgttataatggattataacccattgaacacaactgaattcgtgattccgtaatgatataaataaatacatgaatacattaaaaacttgatgaggaatatatagttatgtagtatcaagaatctgcccacaaagtatttcttttttttttgagatgaagtctcgctcttgtcacccaggctggagtgcaatggtgcgatcttggctcaaaaatcaaagtaaacatcaaccatcatggaacagattgaaattatttgtcaccagatatgatgcaatgagaagtcaaagcatcatctgtgatattcctgccaaatctgcatagtcaggatctgattatgaagaaacatcagataatcccaaattgagagaaatttttaaaactccaaacctatgcttttcaaaagtgacaaggtcaaggaggttgaggaaagactgaggaactgtgtcaggctgtggttgactaaggagacatgacaactagttgcaaaatgtgattcaggattctaaactggattctgaaatgaatacaatgaatatcattgggacttattgaggaaacactaatggaaatgaggattagatggccctaatgcatcaatgttaatttcctgaattttaaagttatattttggttatatagtcaaattgccttgcttataagagctatatactaaaatatttcaggtttagaacttcaggtccaaaattactctcaaatgttcaaaatagagaaaattctctgtttgtacctccaactttttattacatttatagttattaaaattatataaatataaaatacatatgcatttgtgtatatatgtgtatatatagatatgcatatatatagatatgcatatatgtagataagtgatacacataaaaccaataatggactcatatctaatctatgcaagcccttcacaaaagatttgatattgccaaaggacatttgaaaaagcacccggcatcatgaaccttcactgaaatgcaaattaaaactacaataagatattattacacacacatcaaaatggttaaaatgaaaaaagacaatatgctaagggttggcaagaaagagaagcagctggcactctcagtacaattgtaaatttattaaaccatttggataattctttggcagtcattaataaaactgaacacatgcacatgcagcaattatgctcatagttatagcaacagaaatccttatattgggataacaatgtattagagtaataacagcattattcacaatagccacaaactagaatcaactcaaaagtccttaacaatacaatgaaaagataaattttggaattgttataaaataaaacactctaaactaacttacgtactgctatttgtgacaacatgaatgaatctcacaaacacaaaattaagtgaaaatactagatacttaaaaatacataatgtgattccatttatattacatttgtatgcctcacaaacaggcaaaactaacctatggcataatactggagttatctagtcggggaggaaggtaggaggagacataaagggacttctggggtcctggcaaaattatttttcttgacctgtgtgttgattacacagatatgttcaattcatgataattcattgagctatatacatttaggatgtttccaacattctctttgtatactacactccagtgaaaaggtttatttaaaacgaagcagtttgcattcacaatttcacccaagctgaggtttgcattactctctcactgtggagggcttcagccaggtgccctcctgaccatccatttgggcaatgataggaaatctctgcaatgtgagaatcactgaactgggaattaaaacctggattcttaaaaaataaagattatgtactaatgcactagcgaccgttcacctcacttattcaccaattccttatttctaataataaagtagggattaggctggtggatctctgagatctcttgtctctaattatctatgtttctttcattctttgaaaggaccaggcagaagtctcaacagaaaggaggaacagagacccatttttcaagaaataaagtgattgttttaaagaaaggcattgagatcattttatctaaaagaaggtagtgcacttcttttagagttcagagctatgtgagccaagcagtaaaataactatttttctttgtctcagataaattattcaccaaaacctcgactgactcaaattctaaaggttacaaaaccacaccctaattgtaatcaacctatgttgcaactgttgagttggttaatgtgtatttgaaagtcactgattatcctgagtagtgaaatattgcctcatagtacatggtaagtaaatgttggtgactctagttgaactgaatttcttgcttggagggaatgatgtcagagttaggagataggtttccagcctcagccctatcattttcagcctctgtgtccttgaacaaaatactgaatctccaaggcccagcttccttacctctaaagtggaaataattttaccacaggcaagggtaattgagagaatcaaaagagttatgatgggtataaaaattctctgtgaattgtcagaatccctgtaaacatgtttgataaaacattgtccatatgggatttgacaaaacttaatttttccttactgcagttagaaataactgcactaatccagtattatttccaatagccaggatgtagaaacaatctaagtgttcattcacaaataaatggatgaagaaattgtgttttatatttatatacacaatgaaatattttttaaactttaaaaggagatactgccatttgcaatgacatggaatgaacctgaaggatattatgctaagtgatatgagctagatacagaggaaaaaagattgcatgatttcacttatatgaagaatctttaaaaagtcaaatacatagaaacagagagtagaatggtggttaccaaaagtgggagccagaggaaatggaaaaaagtgtgtcaaagagccaaatttgtggttagataggatgaataagtctaaagatctaataaacagcaagaggactatagttaatatactatactgaaaatttgctaaaagagtagattttaggtgcttataccacaaaaaagaagttaattatagaattgattaatatgtaaatttgtttaaccatagtaatgattccactgtttatatgtctaccaatgttgtataccttaaatatatacaatggaaataaacaaataactgtactagtcatttagaataccacaatgacatctttacagaatatgcctttgtacaagcattgccattagtgatctagaaatgtatgtatcattttagtgatatatagagcctcatgagcgctaaatgtcatctccagttcaggtctgcacaactgtgtttgttctgtgccatgggtctgtttaatgatttccctacctcccattcaccactgaagcacatgcctgttgttctgcctataattccccttccttgctgtgcaatatttcattccattatttctgacacagaccaaaaaagcaatagaaacagcagtgtctggaggcaagtgggagctggagaagccatagtttctgagatcttacccacttaattctctgagattggctctttcctcagttatactgagtaggtttcagctcttcagtgacagagaggggagaaaccctagcttttatttcttctcttgagaatgtacaaccctgttattttgtgaacagtgtggtgtagattcagagtgagaaatgtttttaggatttattttattttgctaaaactgttctcaaggcagctctggtgtaagtgagaatataccacagcgggcgtcagaagatctcagttcaaatcccagcctgccatttatgagctgtgggacactggacaggtcatctgttctcctagagtctccctttccccatttggaaaatatgaaataatattctcagccgtccagtgtttttcacggggtttaatggaaaaaggtgtgtatgtttacttagttaattgataaccggtttagccatttaagatgaatgagtttgttagctgctttatgtttaggcagctgtaatgttagtactacattaaaatatttcaaaaggatctcattttcaaggaaaatgatctagtgtttgagaaagcattatagtgttgcagtcttgcagatccttagctcagctaggtccgagttgtcttatgcaggaagaattaggcacacagacactggagagtgagtggagtagaatttattaagtgaaaggaaaactctcagcaaagagagaggccctgaaagcaggttgcagattgccacttcacagttgaataccaggacttttatagaaaagctgatgaggctgggatacttatttgcataaggcgtgaattcctggtgtttccaccccttccttccattgcgcgtgtgggctcttagtctaagccactccatattgatttatttcccttcctgcgcatgtgttaaaggtaggaatttttcactgtgggcatatttaggcaagctccctgtgcaagttcccttatctgcacaaaacatctagtgtaagtacttggggtttttgtggattgggcaatgacctggaagggttggaggttctctggggacccttcccttactgcctgcctaatgcaagctggctaactcctctcaataggataaacattattttatgtacaaggaatataatacacagattgccctcaaagtcatatttccaactgctcatcaatctaaaaatccaaaattttgaataattttttgatgaaataatttatttcattgtttctcaattttggctgcacagtggaaccacctgggctgtttgaaaaaacctaggcctagccaggcacggtggctcatgcctgtaatcccagcacttagggagaccagcctggccaacatggtgaaaccctgtctctgctaaaaatacaaaatcacctgggcgtagttgtgcattcctgtaatcccagccacgccagaagctgaggcagaatcgttcgaatccaggaagtggaggctgcagtgagttgagatcttgccattgcactccagcctgggcaacaagagcgaaactccatctcaaggaaaaacaacaacaacaacaacaaaatcctgggctctgcttcagactagttaaaccagaatctccagggtggggcaccggaaagaacaagaaaaaagaacaccttatttttatcttcttcagtgagccaatgttcattcaaaagagagattaaagtgctttttgctgactagtcacagtcagagtcagaatcacaggtggattagtagggagtgttataaaagccttgaagtgaaagcccgcagttgtcttactaagaagagaagccttcaatggatccagctgtggctctggtgctctgtctctcctgtttgtttctcctttcactctggaggcagagctctggaagagggaggctcccgtctggccccactcctctcccgattattggaaatatcctgcagttagatgttaaggacatgagcaaatccttaaccaatgtaagtatgctttatgttcctccagtaatgtacaaggtgtatttaacctcacaattcttaaagttttatttcattttaaagtgataaatgataattgtatatattaatggggtacaatattacattttgatacatgtatagattgtgaattgatcatatcagggtaattagcatatccatcatctcaaatatttgtcatttctttgtagtgagaacatttaaaatcctcttttttagctgttttgaaatatacagtacattaatattaattatagtcaccttgctgtccaatagaacacccgagcttattcctcctatctaagtgtaactctgtacctgttgaccaacgtatccccttatttggcccatctccacctgccagcctctggtagccaccattctaatctctacttctctgagtttaactttttaagattccacatagaagtgagatcatatatgatatttgcctctctctgcctggcttatttaattaatatgatgttctgtagattcatccatgccgtcataaataagaatattttttcctctttaaaaggctgaatagcatttcattgtacatatatgtcacatacaaaatccattaatttattgatgaacacttaggttgtttccatatcttggctattgtcaatagcactgcaataaacatggaagtacagacatgtcttccacatactgacttcaattcctttgggtatatactggtagtgggattgctggatcatctgatagttctatttttgttttttttaggaacatccatactgttttctcaaatcacaatgctaatttacatacccaaggttcactttattccacatctttgtcaacacttgttatctttttatctttttgataataataatatcttatctatgagttgtgatgagttatctcattgtggttttaatttgcatttctctgatgattaaatttgttgagtatttaaaaaatatatcttggccatttgtatgtctttttttgaaaaatgtctactcaaatcctttgcccatttaattaattaattaattaattaawagagacagggttttgctctgttgtaggatggagtgtagtgatgggatcatggtccctgcagccttgagctcctgggctcaagccatccttctaccttagacccccaagtagctggggctacaggtgtatgccaccatgcctggataattttttaatgctttgtagagatgtggtctcattatgttgtccaggctggtcttgaactcttgggctcaagcaatccacccacctttgtctctcaaagtgctggaattacagacatgagccattgcacttgacccctttgctcgttttaaatagaattatttatttgttattgagtaatttgagtttctaagtattttgggtggtcagaatctcatttgtctagttttgctttcatggcctgtacttttaggatcatatccaagaaatcattgcctagaccaatgtcatggagtttttctatatggtttctttcagtagtttttagtttcaggtcttatgcttaaggctttaattcattttgagttaattcttgtataagggtgagattaggattctcttttattctttgcatatgaatatccagttttcccaacaccttttgctgaagagtgctttccccattgtatgttcttggcacctttgtcaaaaatcaattgattatagatgtgtgggcttatttcagggttctctaygcttttcctttaatcagtgtgtctatttttatgctaatgctatgcagttttgcttactatagctttgtaacatattttgcagttcagtggtgtgatgcctccagctttattctttttggttaatttgctttagttatttggggtcttttgtggttccatacaaattttaagattttttttctatttctgtgaagaatgagattaaaattttgatagggattgcactgaatctgtatattgctttgggtaatatggacatttttccactattagtttttccaatccatgaacatgggatatctttgcctttatttgtgtcatcttcaatttctttcatcaatgatttgtagttttcagtatatagatctttctcttccttgattaaatttattcataagtattttattttttgatgctactataaattaattgttctcttaatttcttttttagatattttgttgctagtgtataaaaatgccactgatttttgcatgttgattttttatccttcaagtttactgaatttgtttatcagttctagcacttttgtactgaagtctttagattttctacatataagattatttcatcaggaaacagacaatttcacttcatcctttcctacatgaatacatcctttcctatacgaatattcctatatgaatattttctgtctttagtctaattgctctgactaggacttccagtactctgttgaacagaaatggtcagagggggcattcttctcttatttctgatcttagaggaaaagcttttagcttttcaccattaaatatgatgttagctgtgggcttgccacatataaccgttaatgtcacatagaaacttctgtattactggaggccagttattaaaggttatatgttataggaacattcctcagcattcctcctgtaccagcagaggctgattattaaagtatgctattgtaaagcaaatacttcctgtggagtatgtttttcttttttgtcattgtcagaaatagtggaataaaataatgcattttgccagaagagaaacatttcaagtggtaaggtagaatcaaaatgataaaggcctgctgctttctttgcttcacagtcatttgctatatttttttgcctgaaggaaaatggtartggaagtgttttgtgattaaagattttgagaagtcagtcactgtatatgctatgtattttgcttagattagccatgatcattaaacgtcttaaaaaagcaaatcatgcctgatgtcaaagaaatatctatgagttcatcataaacataaacgaatgaaagaaagaattaattagtcagggccatctgggtggtaacagaatatttatggcctctgtacaaagctgctgtctgtgacctatgagtgtatagcatggaaaacatttttyctctgtgagatgccacacatcctgatactatctctgttggatccactctccttctgtggtgattataccagtggatctcaaagtgggctgggcagtagaatcatttgggtgatttaaaaaggtgtagattttttagtattgatgacaggactcctgcatcaggatccctatgggatgagctttgcaggagatcctgaagcagtgtcccagcagctgattattggtcaaaatatggacattaggaactgataaactgctcaggctcacagcttgactaagcaggcttcaaatttggaccttctgtttatcagctgtgggacactggcagtgaatttgaaattctttaaaatacaatctgtcttatctgtaaaatagagtaaacaaggtgttgatgtgatgattaagtttaatagcctgcatactacttgcttggcacattgaaggcactgtatatgtgcagctaaaacaataatcatcatctttgtctaaaatatacaaatatttgaagctgtatttgacagaataatcataacaacattatgatgataatatcagtctgaatcacggacaatatatagaccaaatactgagttttgctactatttgaacctccttttctatgtttagttctcaaaagtctatggccctgtgttcactgtgtattttggcctgaagcccattgtggtgttgcatggatatgaagcagtgaaggaggccctgattgatcatggagaggagttttctggaagaggaagttttccagtggctgaaaaagttaacaaaggacttggtaaatgtgcatgtatcgtgtgtatgtgtacatgtgtatgtactgggcagtggctatagggatggggaggatggaaaacaggcttgaagagctcctgggacagaacttgacctgtccacgtggctgccgagtgtcagctctcttgtccttgtttggattctccctcgtagcttctgttttctgttctgctaggaatccttttcagcaatggaaagagatggaaggagatccggcgtttctgcctcatgactctgcggaattttgggatggggaagaggagcatcgaggaccgtgttcaagaggaagcccgctgccttgtggaggagttgagaaaaaccaatggtgggtgacttttttttttcctgaaaaatgttttctaaaatttattttaatttatttttagattgatacataacttttatgcatatttatggggtacntgtaatattttgttacatgcacagaatgtgtaatgatcaagttaggtgtttaggatrtgcatcactttgagcatttatcatttctatattttgagaacagacctgtgttctagctrtcttgaaataygcaatactttgacattaacacactgctatgttctctaatgacatccctggaaacctcctaggggcagccagatctttcatgatagtggttgtcagtcctcatatggagggtggaggtttgaagsagagagccaagggaggttttgtgcacctatgcttgttgtgtttgtacacaatgactatgcatacgctgtgagtataaaaggctcatttaatcctattgtgtcccaggcttggtttgttttcaaatcattacagcatgaatttagaaggttttgtctcatttttttcaaattattaaagagcaatgtttttcccaaagtgtaattgtgggttatctattctagaacatttcaccaggaatacttgtggcacagacatagtgggaatgacttctttacatcttttgggcatggaacaactgacatgtactttcatttgtttggtctatatttgtacagtcagtctcactaacatgtctgggggtttattctaaggtctgtgtctacaatttctaccataatgatgcttatctatggttttaagagactaggcatctttagtgtagcttttatcaattttaatttccctgttaattaagaagtaattaaaattatcagctggtgttatttaatgttactatttactgtaatgttttatatattttaagaaaatatatgctatagcatagtctttcaatttaaacaaatgccaagttataaaatgtttatttaaataaattttaagtattattaataactctttatcctaccttccctagttgtccattagctctgtattcagctttctttatattttccttcatctttacttgtgtattaatcatgttttttattttctatatttttatgaawkcttcaacatcttggggattttgtggtcctagaagggactgctgctcccaaagtcagacagttcctagagatagcaaatgtcttgtccacagcatgtctctgatttacaaagcacactctccagagccagagtcccatccaccttctttaccaaactctcacacatgaatccaatacagttgtccctccttatcagtaaggcattggttctaggactcctcttggataccaaaatccacatatgctcaagtcccttagatatggcataatatttgccatatattggagaatattgacaatattatttataatatttcccaatattagagaatattgacaagaaaaaaggtccgtacatgttctgtacagatgcttgtttttgctctgaatattttttatttggggttggttgaatccatgatacaccatggatacagagtgctgactatattctccttgtcttaaattattatagggccagttatgggacaactatggccacccctatatcccagagcccacagaaattgttcaaactatctattcccaggcttactcagtctaccctccctatctcactcatttcttcctgtgaaaaccccaatgaargctcagccccatggtttctttttgctcttgctgcctcctgaccaaccctggtacttccccatgtggctccccgcactccatggtgtggagtgcccctcctttaggaaccgtgagtaatgaactatcttttcaagggaagtctgttttggggcaacctgatcggttgacctcaccatatctaaatggatacaaaatcctcggtgaattttaaaacaactggatttgggagtaaaagtttatttatcctctccccatccaagttggactcacctataaagttcttgtcataatgagtctggttttcagcttggattacaaattaccctgatttttattatctccctgatatagtttggatgtgtgttcccattcaaatctaatattgaaatgtaacaaactaccaacagagaatactataaacacctctatgcaaataaactaggaaatctagaagaaatggataaatttctcgacacatacactctcccaagactaaaccaggaagaagttgaatctctgaatagaccaataacagtctctgaaattgaggcaataattaatagcttaccaaccaaaaaaagtccaggaccagatggattcacagccgaattctatcagagctacaaggtaccattccttctgaaactattccaatcaatagaaaaagagggaatcctctctaactcattttatgagggcagcatcatcctgataccaaagcctggcagagacacaacaaaaaaagagaattttagaccaatatccttggtgaacattgatgcaaaaatcctcaataaaatactggcaaactgaatccagcaacacacaaaaagcttatccaccataatcaagtaggcttcatccctgggatgcaaggctggtccaacatatgaaaatcaataaaagtaatccagtatataaacagaaccaaagacaaaaaccacatgattatctcaacagatgcagaaaaggcctttgacaaaattcaacaacccttcatgctaaaaactcaataaattaggtattgataggacgtatctcaaaataataagagctatctatgacaagcccacagccaatatcatactgaatggacaaaaactggaagcattccctttgaaaactggcacaagacaaggatgccctctctcaccactcccgttcaacatagtgtyggaagttctggacagggcaatcaggcaggagaaggaaataaagggcattcaattaggaaaagaggaagtcaaattttcgctgtttgcagataacatgattgtatatctagaaaaccccatcatctcagcccaaaatctccttaagctgataagcaacttcagtaaagtctcaggatacaaaataaatgtgcaaaattcacaagcattcttatacaccaatagcagacaaacagagagccaaatcatgagtgaactcccattcacaattgcttcaaagagaataaaatacctaggaatccaacttacaagggatgtgaaggacctcttcaaggagaactacaaaccactgctcactgaaataaaagaggacacaaacaaatggaagaacattccatgctcatgggtaggaagaatsaatatcatgaaaatggccataccacccaaggtaatttatagattcaatgtcatccccatcaagctaacaatgactttcttcacagaattggaaaaaactactttaaagttcatatggaaccaaaaaagagcccgcattgccaagtcartcctaagccaaaagaacaaagctggaggcatcacaccacctgacttcaaactatactacaaggctacagtaaccaaaacagcatggtactggtaccaaaacagagatatagaccaatggaacagaacagagccctcagaagtaatgctgcatatctacaactatctgatctttgtcaaacctgacaaaaacaagcaatggggaaaggattccctatttaataaatggtgctgggaaaactggctagccatatgtagaaagctgaaactggatcccttccttacacctgatacaaaaattaattcaagatggattaaagacttaaatgttagacgtaaaaccataaaaatcctagaagaaaacctaggcaataccatttaggacataggcatgggcaaggacttcatgtctaaaacaccaaaaacaatggcaacaaaagccaaaattgacaaatgggatctaattaaactaaagagcttctgcacagcaaaagaaaccaccatgagaatgaacaagcaacctactgaatgggagaaaaattttgcaacctactcatctgacaaagggctaatatccagaatcacaatgaactcaaacaaatttacaagaaaaaaaaaagatccccatcaaaaagtgggcaaaggatatgagcagacaattctcaaaagaagacatttatgcagccaaaaacacatgaaaaaatgctcatcatcactggccatcagagaaatgcaaatcaaaaccacaatgagatatcatctcacaccagttagaatggcgatcattaaaaagtcaggaagcaacaggtgctggagaggatgtggagaaataggaacacttttacactgttggtgggactgtaaactagtttaaccattgtggaagtcagtgtggcgattcctcagggatctagaactagaaatgccatatgacccagccatcccattactgggtatatacccaaaggattataaattatgctgctataaagacacatgcacaggtatgtttattgcggcactattcacaataacaaagacttggaaccaacccaagtgtccaacaacgatagactggattaagaaaatgtggcacatatacaccatggaatactatgcagccataaaaaatgatgagttcatgtcctttgtaaggacatgaatgaagctggaaaccatcattctgagcaaactatcgcaagaccaaacatcacatgttctcactcataggtgggaattgaacaatgagaacacatggacacaggaaggggaacatcacacaccagggcctgttgtggggtgggggaaggggggagggatagcattaggagatatatctaatgctaaatgacgagttaatgggtgcagcacaccaacatggcacacgtatacatatgtaacaaacctgcacgttgtgcacatgtaccctaaaatttaaagtatataaaaaaaagtgtaatcccccatattggaggtggggccttgtgagaggtgattggatcatgggggtggatttttcatgaatagtttagtaccatcccttttggtactgtcctcatgatagsaagtgagttttcatgaaatctaaagtgtgtagcacctcccacctcccttttttgctttgrcttttgccatgtgagtgaaagctcctgttttgccttctgccgtgattgcatcacgcttcctgtacagcctgcagaactaggagccaattaaacctcttttcttataaattacctagtctcaggtatttctttatagcaatgcaagaacagcctaatatacttccccacatgaagtgaaaggaaagaccagaaaccagattttcactacatcatgttcatatgcatgcacaaacacacttgcatgcatgcatgcacacacacacagaaatctctaactaataatccaaaattatcccctgccttccaggctaaaataaaagattttctgaaaacttcatcccttggcatgtttcagctgaaaagaagcctggcataggagcagttaactaaacagggtcccattatttaattccccatcattaccgcacaacatttttgttcaagtcactcttaattacattcatgatactctcacatgtaaagttcattgatgatttgattataacaattttatttaaaaattgccctttcctcttattgcccttacatttcagtatgagatttgaagggaacacacatccaaactgtatcagggagataataaaaatcagggtaatttgtaatccaagctgaaaatcagctttcctctatagtaatttattgatttgtaatatgatggaattacctaaatgatgatcaaattaaaaagtttataataacataaggtatttttttgatggctagatagaacaataaccgaggattctataagaggtcaggctttgttcaaataaattgaagataktgcctggtgataatagacaccatttcttagagcaggaaattccttttttttctttgaatattgaaataaggaaataaaaggactccatctgtcaatttaactttttctgtctgctctatttgtagtttaggtttgaaatgaaagtttcttattacttttattttaggcaaaccaatctatcttcttatttgtgttaatttgtgttagattttttcttgtataacatagatgacttttgcctgtttacatttrttccatcaacctgaattttcccataccctttctgtctttagtctccccctctgctggtactacacacagttactttaactactcrttatatagaagatgttttctggttcctattttctcccttcctctatcaatcaattgtctacaagcttttcagacagatgttattttgcactgatgacctgaattattaggtggttttaaatgtggcctctttaattttttttgttttctcttcaaaataacaggcatcttgggtcagaattgtgtaaagaaaggcagtgcggtaaatgcagtatttggaaaaccattattaaacaagctagggtggaatgattaattcagttttaaggaaaaagtgaggtattaaatttcaatatgctgtagtttgtgttgataagagaatttctaggtaggtattggtttagagtttctaaaaatactttttcctgtatcaaagacaaagtattttatatgtatattttaatggtaatttaaaatatttccaatcctttagcctcaccctgtgatcccactttcatcctgggctgtgctccctgcaatgtgatctgctctgttattttccatgatcgatttgattataaagatcagaggtttcttaacttgatggaaaaattcaatgaaaacctcaggattctgagctctccatggatccaggtgagatcaagagcttctcttcctgagatattatttttgttattttatcagacagtccaatttttttaattttttaaaattatactttaagttctgggatatgtgtgcagaatgggcaggtttgtcacatgggtatacatgtgccatrgtggtttgctgcacccattaacccgtcatctatattaggtatttctcctaatgctatccctccctttacccccaatcacccaacaggccctggtgtgtgatgttcccctccctgtgcccatgtgttctcattgttcacctcccacttaagagtgaaaacatgcagtgtttggttttctgttcctgtgttagtttgctgagaatgatggtttccagcttcatccatgtcccggccaaggacatgaactctctcagcatttgcttgtctgtaaaggattttatttccccttcacttatgaagcttagtttggctggatgtgaaatgctgggttgaggcagaagacagatgatttctgcatttccaactgaggtactgggttcatctcactaggcagtgtcaaacagtgggtacaggacagtgggtgcagcacaatgagcatgagccaaagcagggtgaggcattgcctcacccgggaagcacaaggggtcagggaattccctttcctagtcaaagaaaggggtgacagatggcacctggaaaatcgggtcactcccaccctaatatggtgcttttccaatgatcttagcaaatggcacaccaggagattatatcctttgcatagctcagagggtcctacacccatgaaacctcactcattgatagcacagcagtctgagatcaaactgcaagatggcaatgaggctgggggaggggggcctgccattactgaggcttgagtaggtaaacaaagtggccgggaagctggaactgggtggagcccaccgcagctcaaggaggcctgcctgcctctgtagactccacctctgggggcagggcatagccaaacaaaaggcagcagaaaactctgcagacttaaatgtccctgtctgacagctttgaagagagtagtggttctcccagcacacagctggagatctgagaacggacagactgcgtcttaagtgggtccctgaccccccagtagcctaactgggaggcacaccccagtaggggcagactgacacctcacatggctgggtactcctctgagacaaaacttccagaggaacgatcaggtagcaacatttgctgttcaccaatatctgctattctgcaacctctgctgctgatacctgggcaaacaggtctggagtggatctccagcaaactccaacagacctgcagctgagggtcttgactgttagaaggaaaactaacaaatagaaaggacatccacaccaaaaccccatctgtacgtcaccatcatcaaagaccaaaggtagataaaaccacaaagatggggaaaaaacagagccgaaaaactggaaactctaaaaatcagagtgcctctcctcccccaaaggaatgcagctcctcaccagcaacagaacaaagctggacagagaatgactttgacgagttgagagaagaagacttcagacgatcaaactactccaagctaaagcaggaagttcaaacccatggcaaagaagttaaaaaccttgaaaaaaaattagatgaatggctaactagaataaccaatgcagaaaagtccttaaaggacctgatggagctgaaaaccacggcccgagaattatgtgatgaatgcacaagcctcagtagccgatttgatcaactggaagaaagggtatcagtggtggaagatcaaattaatgaaatgaagtgagaagagaagtttagcaaaaaaagaataagaagaaatgaacaaagcctccaagaaatataggactatgtgaaaagaccaaatctatgtctgattggtgtacctgaaagtgacggggagaatggaaccaagttggaaaacactctgcacgatattatccaggagaacttccccaatctagcaaggcaggccaatattcaaattcaggaaatacagagaatgccacaaagatactcctcgggaagagcaactccaagacacataattgtcagattcaccgaagttgaaatgaaggaaaaaatgttaagggcagccagagagaaagcttgggttacccacaaagggaagcccatcagactaacagctgatctctcagcagaaactctacaagctagaagagaatgggggccaatattcaacattcttaaagaaaagaattttcaacccagaatttcatatccagccaaactaagcttcataagtgaaggagaaataaaatcatttatagacaagcaaatgctgagagattttgtcaccaccacgcctgccctacaagagctcctgaaggaagcactaaacatggaaaggaacaaacagtaccagccactgcaaaaacataccaaattgtaaagaccatcgaggctgggaagaaactgcatcaactaacgagcaaaataaccarctaacatcataatgacaggatcaaattcacacataacaatattaaccttaaatgtaaatgggttaaatgctccaattaaaagacacagactggcaaattggataaagagtcaagatccatcagtgtgctgtattcaggagaacaatctcatgtacagagacatacataggctcaaaataaagggatggaggaagatctaccaagcaaatggaaaacaaggaaaggcaggggttgcaatcctagtctctgataaaacagactttaaaccaacaaagatcaaaagagacaaacaaggccattacataatggtaaagggatcaattcaacaagaagagctaacgatcctaaatatatatgcacccaatacaggagcatccagattcataaagcaagtccttagagacctaygaagasacttagactcccacacaataataatgggagactttaacaccccactgtcaacattagacagatcaaggagacagaaggttaacaaggatatccaggaactgaactcagctctgcaccaagcagacctaatagacatctgcagaactctccaccccaaatcaacagaatatacattcttttcagcaccacaccacacttattccaaaattgaccacatagttggaagtaaagcactcctcagcaaatgtaagagaacagaaattataacaaactgtctctcagaccatggtgcaatcaaactagaactcaggattaagaaactcactcaaaacccctcaactacatggaaactgaacaaactgctcctgaatgactactggtacataatgaaatgaaggcagaaataaaaatgttctttgaaaccaatgagaacaaagacacaacataccagaatctctgggacatattcaaagcagtgtgtagagggaaatgtatagcactaaatgcccacaagagaaagcaggaaagatctaaaaatgacatgctaacatcacaatttaaaaaactagagaagcaagagcaaacacattcaaaagctagcagaaggcaagaaataactaagatcagagcagaactgaaggagatagagatgcaaaaaacccttcaaaaaatcaatgaatccaggagctggtttttttaaaagatcaacaaaattgatagaccactagcaagactaataaagaagaaaagagaagaatcagttagatgcaataaaaaatgataaaggggatatcaccaccaatcccacagaaacacaaactaccatcagagaatactacaaacacctctatgcaaatacactagaaaatctagaagaaaagaataaattcctcgacacatacaccctcccaaaaataaaccaggaagaagttgaatcyctgaatagaccaataacaggctctgraattgaggcaatagttaataacttaccaaccaaaaaaagttcaggaccagatggactcacagctgaattctatcataggtacaaggaggagctggtaccattccttctgaaactattccaatcaatagaaaaagagggaatcctccctaatgcatttggtgaggccagcatcatactgataccaaagcctggcagagacacaacaaaaaaagagaactttagaccaatatccctgatgaacatcgatgcaaaaatcctcaacaaaatactggcaaaccgaatccagcagcacatcaaaaagcttatccactatgatgaagtgggcttcatccctgggatgcaaggctggttcaacatacacaaatcaataaacgtaatccagcatataaatagaaccaaagacaaaaaccacatgattacctcaatagatgcagaaaaggcctttgacaaaattcaacaacccttcatgctaaaaactttcaataaattaggtattgatgggatgtatctgaaaataataagagctatctatgacaaacccaaagctgatcataccgaatgggcacaaactggaagcattccctttgaaaacaggcacaagacagggatgccctctctcatcactcctattcaactagtgttggaggttctggccagggcaatcaggcaggagaaggaaataaaaaatattcaattagtaaaggaggaagtaaaattttccctgtttgcagatgacatgattgtatatttagaaaaccccattgtctcagcccaaaatctccttaagctgacaagcaacttcagcaaggtctcaggatacaaaataaatgtgcaaaattcacaagcattcttatacaccaataacagagaaacagagagccaaatcatgagtgaactcccattcaaaattgcttcaaagagaataaaacacctaggaatccaacttccaagggatgtgaaggacctcttcaaggagaaccagaaaccactcctcaatgaaataaaagaggacacaaacaaatggaggaacatttcttgctcatggktaggaagaatcaatatcatgaagacggccatactgcccaaggtaatttatagattcaatgtcatttccatcaatctaccaatgactttctgcacagaattggaaaaaactactttaaagttcatatggaaccaaaaaagagcccgcattgccaagtcaatcctaagccgaaagaacaaagctggaggcatcacactacctgacttcaaactatactacaaggctacagtaagcaaaacagcatggtactgctaccaaaacagagatatagaccaatggaacagaacagagccctcagaaataatgccacatatctacaaccatctgatctttgacaaacctgacaaaaacaagcaatggggagaggattccctatttaataaatggtgctggtaaaactggctagccatatgtagaaagctgaaactggatgccttccttacaccttatakaacaattcaagatggattcaatacttaaatgttagacctaaaaccataaaaaccgtagaagaaaacctaggcaataccattcaggacagaggcatgggcaaggacttcatgtctggaataccaaaagcaatggcaacaaaagccaaatttgacaaatggatctaattaaactaaagagcttctgcacagcaaaacaaaccaccatcagagtgaacaggcaacctacagaatgggagaaaatttttgcaatctactcatctgacaaaaggctaatatccagaatctacaatgaactcaaactaatttacaagaaaaaaagaaccccatcaaaaagtgggcaaaggttatgaacagacacttctcaaaagaagacagttatgcagccaaaggacacatgaaaaaatgctcatcatcactggccatcagagaaatgcaaatcaaaccacaatgagataccatctcacaccarttagaatggtgatcattaaaaagtcaggaaacaacaggtgctggagaggatatggagaaataggtacagttttacactgttggtgggactgtaaactagttcaaccattgtggaagtcagtgtgatgattcctcagtgatctagaaatagaagtaccatttgacccagccttcccattactgggtatatacccaaaggattataaaacatgctactataaagacacatgcacacatatgtttattgtggcattattcacaatagcaaagacttggaaccacaccaaatatccaacaatgatagattggattaagaaaatatggcacatatacaccatggaatactatgcagccataaaaaatgatgagttcatgtcstttgtaaggacatggatgaagctggaaaccataattctcagcaaactatcgcaaggacaaaaaaccaaacactgcatgttctcacttataggtgggaattgaacagtgagaacacacggacacgggaaggggaacatcacacactggggcctgttgtggggcggggaaagggggagggatagcattaggagatacacctaatgttaaatgaagagttaatgggtgcagcacaccaacatggcacatgtatacatatgtaacaaacctgcacgttgtgcacatgtaccctaaaacttaaagtataataaaaaataattaaaaaaagaaattcctctccacctctaccacacagtctcagagtgtacacagttgttcccagtttcccatgattgggaaggactcaaacactatgatggcaggtcaactttctgtcatcttgtccaagggaaaagcacactaagctgggagtgaatgagcctgacctaaacagcagcagagagaatgaggtggagaggagaaggaagaggatagttaggagaagtctgaagcctatagcttagagagtgtcttcctcatgaaaaattgcactcactgggcagtggcattacagaaacaggcttaatttggattaatctttctgtaaatctgtattgagaattgtttcataaaacaatgtcactggtaaaaaaaaaataaaaaagaaattcttggttgaaaattcttttctttaaaaatgttgaatagtggcccccactctcttctggcttgtctggtgtctgcacagagatctgctgttagtctaatgggcttccctttgtgggcaacctaacctttctctctggctgccctcaatattttttccgtcatttcaaccttggtgcatatgatgattgtgtgtcttggggttgctattctcgaggagtatctttgtgatgttcctgtatttcctgaatttgaatgttggcctgtcttgctaggttggggaagttctcctggatagtatcctgaagcgtgttttccaacttggttccattctcccygtcactttcagatacaccaatcaaacatatgtttggtcttttcacttagtcccatatttcctggaggctttgttcgctccttttcattcttttttctctaatcttgtattctcactttatttcattaagttgatcttcaatgtctgttatcctttcttctgcttgatcaatttggctattgatagttgtgtatgcttcatgaagttcttgtgctttgtttttcaactccatcaggtcatttatgttcttcttgaaactggttattctagttagcaattcctctttttatcaaggttcttagttcccttgcattgagttagaacatactccttgagcttggaggagtttgttattacacatcttctgaagcctacttctgtcagtttgtcaaactcattctccatccagttttgttcccttgctgttgaggagttgtgatcctttggaggagaagaggcattctggtttttggaatttttagtctttttgtgctggtttttcctcatcttcatggatttatctacctttggtctttgctgttggtgaccttcggatggagtttttgcatggtcgtccattttgttgattttgatgttattgctttctgtttgttagttttcctcctaacagtcaggcccctcttctgcaggtctgctggagtttgctgggggtccactccagaccctgtttgcctgggtatcaccagcagcggctgcagaacagcaaagattgctgcctgctccttcctctggaagcttcatcctggtggggcaccagccagatgccacccagagttctcctgtatgacatatctgtcaaaccgtgctgggaggtgtctccctctcaggaggctcaggggtcagggacccacttgaggaggcagtctgtcccttagcagagcttgagggctaggctgggagatctgctgctctcttcagggccatcaggcagaaacgtttaagtctgctgaagctgggcccacagccaccccttcctccaggtgctctgtcctaggaagaggtggttttatctatagtcccctactggggctgctgcctttatttcacagatgccatgcccagagaggaggagtctagagagacagtctggctacaggggctttgtggtgctgcggtgggcactgcccagactcatcttcccagaggttttgtttacactgtgaggggaaaaccgcctactcacacctcagtaatggtggactcccctccctcccatcaagcttgagcatccgaggtcgacttcagactgctgtgctggcagtgagaatttcaagctagtggatcttagcttgctgggccccatgagggtgggatcctgtgagctagaccacttggctccctggcttcagccccctttccaggggagtgaatggttctgtctcactggaattcaggtgccactggggtatgaaaaaaagacttttgtagctagcttggtgtctggccaagtggccacccagttttgtgcttgaaacccagggcccttgtggtgtaggcatctgaaggaatctcctagtttgtgggttgcgacaggttgcgaagaccgtgggaaaattgtagtatctgggctggatagcactgtccctcatggcttcccttggctaggggagggagttccccaacccgttgtgcttcctgggtgagccaattccctaccctgcttctgtttgccatccgtgggctgcacccactgtctaactagtcccagtgagatgaaccgggcacctcagttggaaatgcagaaatcacgggccttctgcattggtctcgttgggaaccacagactggagctgttcttatttggccatcttgccccaatcccagtccagaactttgtatgtaccaagctgtgaagtgaatgtttgaaaactggaaattttggatactcttatatagtagctctggaaatcagagtctttcctctctttagggtgttttgttgcctgctatagttttttttttttttcttctgaaggctatagcttcctttagtgacttttcaaaactatttttgcaagtcatgtgtggtttctgaagtcttttctttagcgtatgttcagctaattttgacagaaattttcttgaatgtggagaggcaaaaaagagacatagaaaaaatatatgtatttatatatataaatagcagaagaaagatggaaggaagtaaggaaaggaaggaaggaggaaaggaatgaaggaagaaaggaaggaaggaaggtctttcagattggctggagcactccttgtcatagccttcacttactgcttaagttgagcctggatatcagccagaggtgaaagttcaggatcttctcacatttttctaactagcctgtcccgctctgggcatgttgataactttctaaatttcttagtatacataggcacttttgaacatcccattttccaaagaaactgtctcccagcttttattctcaggattttagtgctctactgtgtgccttaactataatcgtttgccctaggtagctttgggttgttcatttgtcttaggagatttttgagaaatgtccattgcttttccatcctgagtgagttttgaatcaggtgaaacaaagatgactgcctcgtgttagcccgtgttagtcctcagacaggtgagaaagagaaacataattttttgcaagtaaggtcttctgtggtccctctgtaaataggaaccagggccttccactgcgagcagggctgcccttgacaagatcactgccaagctgatgagggaggtggtacaagtgcaaataaacataccacaaagcttacatatgcatcatggaatactatgtagccataaaaaggaatgagattatgtcctttgcagggacacagatggagctggaagccattatcatcagcaaactaatgcaggagcagaaaaccaagcaccacatgttctcattcataagtgggagctgaacaaggagaacacatggacccagggaggggaacaacacacactagggcctgtccggggtgttggtggagggagagcattaggaaaaatagctaatgtgtgcggggcttaatacctaggtgaagagtttataggtgcagtaaaccaccatggcacacatttacctatgtaacaaacctgcacatcctgcacgtgcaccttggagcttaaaataaaaataaaaacccacaaagcttttctactgtttttaagttgccattttttttattcagttctcccttgtttgctataaacctttgactgatttccagagttctgttagagttgattctgacttttttgtttgaatttttgggtgtttttatggagagatgggcccatggaactgtctattgtgccaattttgcgggcattattctgtgaagtgagtggttgaacactacagcttgcccatatcttagcattgtggcattaacatctgggaaagatagatgatttctttattttacagatgagaaaagaaatgcctgaatatagagctggaattcaagcccrttagctggtggtttttcccaccaaacccccaaatccagtttctggcagtactttggtgactgcccaaaagcacacactcaatggaaatccaagtcccttgttgaaaagctggcattactcacaggcttttcctctaattcacacctagagacctcttcatcacattatttggcaaaaggggaggaggttttggagaacagatgctaccaggaagttctgaataggataggggtgtttgctgcttcagcaaggtaattaaggttaagatgacaaaatgattggattttggggtgtatgaaccattaaaaaattacagttttgsctgtgctgagctagcatgtcctgaactctgtctaaaggataattgtgtgattatctcaactactcacggaagtatcttaactactctggtgtatgggtacttatccataaaatgctgagttacattttatggtawctttktacccctcccagttataaaagagtgattctatttctgaggcttcctgctaggagtagaaatagcagggwatggctttgtgatctatttcatgttgttcaaatttccttaccctctgttcttatctgtaaaatgggaattaaagcaattcatggcattctatatttcaaggctatggagaagaattaatgtamaaaaatgagataattgacatgaagctattttaatattctgaaaataatatatgagtatagaaaattatcatmtttgatcccttgttcagaattttctaacttaaatctttctatcagtatrgaggactactttgtacgtataatcaaatgctcctcttacagagggagataatttttaaaaattcactccagttttaaaccagcagttgacttatggcatatgtcttcaatacatgtgtttaatttaattaatttttaaaaatctttaaggtctgcaataatttccctgctctcatcgattatctcccaggaagtcataatraaatagctgaaaattttgcttacattaaaagttatgtattggagagaataaaagaacatcaagaatccctggacatgaacagtgctcgggactttattgattgtttcctgatcaaaatggaacaggtaaaatgttatttgtttgcctgcatcttgtggttcattgattagttctataacgattgcttaaatagtgaggcaagaaacacttcatgagcactttatgtacttaycatgtgtatagatctggatgaagcaccatggagaatttataattgaattgttaaacaattataatatgtgagcaccattgttaggtactaagaatttatctgagaaaagacagaatrcatgccttagatgaaagggaaatacaaataagatagaaaatgcaaaatatagcatcataaattgaaggtggacatggtcatatcacacagcatatgggagagtgaggtgaaagggtttaacctaagtgggcctcctgcatgtcctgatgtttggtgtaaatgttaaaatatttacartgaataacggggcagtcaattttttggtgtgcagaacagtgtgatgacaggttcagaggtgtgtggtggcaaagagatggaaaagggaggccttaactgaatggaaccaaaagtaaatccggacaaatatggaattggaggtgtctgtaagctgcagacctgaatgctggcatggagagttttgatgtgatcaggtatatgtgtgagccctaacaagagtgggatgcgtataattattagagaaaataatcctaggaattgtgtagaaggatatgtacaatgagaatggaggtcaaaaacttgctacaagacatttcatatatttgaagttcagcttgctgaaagtgtgggctacagaaacagattctgaaataaaatcaagttgtccattttgtcatattgccaaaaatctatggatattagtttcagttagaggatcagataggagccaaatgataggacctgtgtgggaaatttcagtaatgagagcagacattctctttgataactttaactgaggagggaaagattcagatggtgaatttgaatagtggtagggtcaatatggaaactgtgaggaaggtaatatagatgcttcaggacactaaggtgcaaagtactctttgaactgagaagaggcccaatccagaacaaactgaaaagagttaactctagagaataaaatctttcctctgaagccaccattattttattcaaccgctttacagcactaggtggaaatgcagaatcagtcagtaggtgaaaatgggacagagtcaaagatgctgatgaaggtgacttccatgaaattgcccatggaatgttagcaggactgctcgaataatgtgttctagatggagtgaagtgaagaagatgagatactttgaggaaactggagaagggaagaaacaaattatttgtactctccaccttctctactgctaggtcaattgttctgaggtctaattaatttaagaatctcattaaaatatggacactgccasaaaaatgacactatatgagttctccatttttgtacacatttaggggggtttccttaatgctatgaattgtctccattaattccaggttaaggagaattgtaaggtctatggtgtttcagtgaccagtggctatgtcctcattactatatttaaaaagtgcattgttcctttgacctcactataatatttagaatctagcttattttatttttcacagcatttttattgagtttaattcacatattgtaccctcatacattttaaatacaattcaacagttttagtatttttcacagagctgtgcagccaccaccacaaccaatttcagaacatttccatcatcctgaaaagacaaccatatgcttaacagtcaccctgtattggggtggctctagtcaacactaatatactgtctgtctctataggtttgctattgtagacatttcatgtaaatgaaattacacagtatgtggtctttgtttgtctgacttctgtcacttagcacaatgttttcaaggttcattgacatagcatgtatcagtacctcattcctttatgtggtcaaataatatttgggtgtggctatatcatattttatatttccattcattagttgttggttttgattgtttctgttttggctgttatgaataatgctggtatggacatttgtgtacaagtttttgtgyatagataagtttttatttctcttgggtatatacttggctgcagaattgctggattatacagcaactgtatgcttaatctttggagaaaccgtggctggatcaaagacctaaatgtaagagctaaaaatataaaactctcagaagaaaacctaggcatgaaatttgctgcaccatttcgtattctcactacaatgttttgaggattccactttctccacaaccttgctaatgtttcttatctttttgattccagccatcccagtggggttgaggtggttccatgtggtttggtttgcattttcctgacatcaaataattttctcttgtgcttactggtcatttgtgtatctctttggataaaagtatattcagaccttttgtccgtttttaaattaggttattatatttttaaaattattgagatggaaaagtttttatatattctagataaaagtcccatatcagatgttattaaagatattttctcccattttgtcaagtgtctttcactttcttaacagtgtcttttgaaatacaagtttttagtttttgtgaaatccaatttatttatttatttgcatggtttcttgcaatttttttgtcacgtttaagaaatgatttcttagtccaatatcacaaagattcaccccaagttttcttcaaatggttttataattttaactattacatttaggtctaagatccactctgagtcaatttttgattatagtgtgaggtatgggtacaacttcattctttgcatgtgcattcagttgtcctagtaccatttgttgaaaagactattcattccccattgagtgatygtggtacatttgttgaaattcagttgactacaaacaygaggatttatttttagactctaaattctatttcattgatctatatagctttctttatgccagtatgacagtactttttttttttgagacagggtctcgctctggttgcctaggctatagtgcaatggtgtgatcttggcctctacctcccgggctcaggtgattctcccacctcagcctcctgaatagctgggattacaggcatgtgccactatggccagataatttattgtatttttagcagagacagcctttcgctattttgcacaggctggcctccaactgctggcctcaagcagtccacccaccctggcctcccagattgctgggatcacaggagtgaaccacgcacctgggtgatggtagcttttatgtaagttttgaaattggaaagtgtcagttctccagttttgttctttcccaagattgttttggttcttagctattttggttgtgtagagttccccatgaattttatggtaatcttgtccatttctattaaaaaggtaacagatattttgatatggatcactttgaatctgtagatcaatttgggaagtaatgccattttaacgatattaagtcttccaatagatgaacatgggatgtctttccatttatttagatcttctttaatttctttcaacaatgttttgtgtcagctagcttaattttgataggctatttgtacataaccactgatttttcaaattcacttaaacagaaggaaatattagtattggtttataagtgctctactctccttcctggctttggtgtaattttgagttgataagcttagaaaactgtgttaagttgatgttaccaatgggcatgatgacctttgtctagcaagtacatctgttgagaggactaggtttgtcttactgtggttgattacataatattaggcatgccacaggtcacatggagattataacagccttattaaattaatgctgttctagaggattgaataggaagaaatctttttttgtatgttaattactccctatagtcaataatttagactgtcccattgttatggtcaattttgtgttacatatttccctcatcttaaaccagccttagttgccttgtgaagtgctttgttcttccactctccattttattattaatggcataaactgcaattactttttcaccaactgaatataagaactcagttcattcagtcccttgtcctaagcatctccattgcccttactctctccttcatcctgtataggtggttaatgtccaaactctctgtcttcatgtctgtmgtgtctcttcaatttctatattcttattcattcctgtgcttgttyactagatcaagttgactattacctcacatctggaatataataatggctggccccatcttgtcttgtcaatctgttctctttctccataatcttggatatgttaccatgttatcttttgcacatttccgagttcataatgagtctgcaggcaatattgagtgtgactaaattcttttttttttctcagacagagtcttactctgtcacccaggctggaatgcattggcatgattgtggctcactttagctcgaccttctggactcaagtgatcctcccacctcagcctccccagtagttgggactgcaggtgcacatcaccatgcccagataattaaaaatttgtttttatagagatagggtctcactgtgtttgcccaggctggagtggacctcctgaactcaagtattcctcctgcctcagcttccgacagtgctgggatttaaggcatgagccactgtgcccagtctaaattacctataattccttatacaatgtaaatgccatgtaartggttgttatactgtattttttagggaataatgacaagaaaaagaagtctgtacatgtccaatatgaacacttttttttttctgaattttattcttttttgttttagaggcagaatcttgccccattgcccaggctgttgtgaagtggtatgaccatagctcactgcagccttgaactcctgggctcaagcaattcttccacctcagcctcctaagtatatgggacaacaggtgcatgccaccatgcccaactaattttttttttttttttttttgtagagatagggtctttccaggttgcctaggctagtcttgaacttctgggctcaagcgatcctcccatcttggcctcccaaagtgctgggattacaggcatgagccacctcacctggcctctttttccaatttttttttttttttatttaaggttggttgaatcaatggatgtggaatccatggataggaaggtggattgtactctattattagctatattcaactggctgtgcaatttattattttttaaaaaagagatcagatttactcctccattctaacaggctttataccctttgactatcatctccccctttccccccgcccccaagccctctggcaatcagcattctactctcttctatgagttcggttgttttagattccacatataagtgagaatatatagtatttgttttcctgttcctgacctgactttacttagcataatgttctccagttccatccctgttatcacaaataacagaatttcttcatttttaaggctgaatagtattctattgtgtatatataccacattttctttatccatttatctgttgatgggcacttaggctgattctatatattagctattgggaatagtgctgcaatttacatgggagtgcagacattgctttgacatactgatttcaaatcttttgagtaaatgcccataagccgaatcactggatcatgttgtaattctatttttagttttttgaggaaccttttactgttttccataatggttgcactaacttacattcccatcaacagtacacaagtgttcccctttttccacatcttcaccaacacttgttttttctctctttgataatagccattctaacagatgtgaggtgatagctcattgtgtttttaatttgtaactttttaatgattagtgttgttaagcatctttttatgtatctcttaatcatttgtatgtcttctttttagaaatattcattcaggctatttgcccatttcttaattggattatttgttttctttctatagagttgtttaagttccacatatatgtgcatgcatgtctgtgtgtatatagtttttaattttaattttaattttaaaagaagtatagaaatttaatatgtttttcttccaatgttatkttttctcatatttttttctttttttaattatactttaagttctagggtacatgtgcacaatgtgcaggtttgttacatatgtatacatgtgccatgtaggtgtgctgcacccattaactcatcatttacattaggtatatctcttaatgctatccctccccgctccccccaccccacaatagtcccccgtgtgtgatgttccccttcctgtgtccatgtgttctcattgttcaaatcccacctatgagtgagaacatgcggtgtttggttttttgtctttgtgatagtttgctgagaatgatggcttccagcttcatccatgtccctacaagggatacgaactcatccttttttatggctgcatatattccatggtgtatatgtgccacattttcttaatccagtctatcactgatggacatttgggttggttccaagtctttgttattgtgaataatgccacaataaacatacgtgtgcatgtgtctttatggcagcatgatttataatcctttgggtatatacccagtaatgggatggctgggtccaatgatatttctagttctagatccttgaggaattgccacactgtcttccacagtggttgaactagtttaaagtcccaccaacagtgtgtaaaagtgttcctatttctccacatcctctccagcacctgtttcctgactttttaatgatcgccattctaactggtgtgagatggtatctcattgtggttttgatttgcatttctctgatgaccagtgatgatgaacattttttcatgtgtctgttggctgcataaatgtcttcttttgagaagtgtctgttcatatacttcacccactttgtgatggggttgttttttttcttgtaaatttgtttgagttctttgtagattctggatattagccctttgtcagatgagtagattgcaaaaattttctctcattctttaggttgcctattcactctgatggtagtttcttttgctgtgcagaagctctttagtttaattagatcccatttgtcaattttgtcttttgttgccattgcttttggtgttttagacatgaagtccttgcccatgcctatgtcctgaatggtattgcctaggttttcttctagggtttttatggttttagatctgacatttatgtctttaatcmatgttgaattaatttttgtataagatgtaaggaagggatccagtttcagctttctacatatggctagccagttttcccagtaccatttattaaatagggaatcctttcctcatttcttgtttttgtcaggtttgtcaaagatcagatggttgtagatgtgcggtattatttctgatggctctgttctgttccattggtctatatctctgtgtcagtaccagtaccatgctgttttggttactgtagccttgtagtatagtttgaagtcaggtagcatgatgcctccagctttgttcttttgactcaggattgacttggcaatgtgggctcttttttggttccatatgaactttaaagtagttttttccaattctgtgaagaaagtcattggtagcttgatggggatggcattgaatctataaattaccttgggaagtatggccattttcacaaaattgtttcttcctatccgtaagcatggaatgttcttccatttgtttgtgtcctcttttatttcattgagcagtggtttgtagttcttcttgaagaggtccttcatrtcccttggaagttggattcctgggtattttattctctttgaagcaattgtgaatgggagttcactcatgatttggcactctgtttgtctgttattggtgtataagaatacttgtgatttttgcacacttattttgtatcctgagactttgctgaagtttcttatcagctttttggagattttgggctgaggcaatggggttttctaaatatacaatcatgtcatctacaaacaggaacaatttgacttcctcttttcctaattgaataccctttatttctttctcctgcctgattactctggccagaacttccaacagtatgttgaatagaagtggtgagagagggcatccctgtcttgtgccagttttcaaagggaatgcttccagtttgtgcccattcagtatgatattggctttgggtttgtcataaatagctcttattattttgagatgtgtcccatcaataccgaatttattgagagtttttagcatgaaggtttttgaattttgtcaaaggccttttctgcatgtagtattgagataatcatgtggtttttgtctttggttctgtttatatgctggattacatttattgatttgcatatattgaaccagccttgcatcccagggatgaagccaacttgatcatggtagataagctttttaatgtgctgctggaatcagtttgtcagtattttattgaggatttttgtatcgatgtgcatcaggaattttggtctaaaattctctttttctgttgtgtctctgtcaggctttggtattacgatgatgctggcctcatcaaatgcattagggaggattccctctttttctattgattggaatagtttcagaaggaatggtaccacctcctccttgtacctctggtagaatttggctgtgaatccatctggtcctggactttttttttgttggtaggctcttaattattgcctgaatttcagagcctgtgattggtctattcagggattcagcttcttcctggtttagtcttgggagagtgtatgtgtcgagaaatttatccatttcttctagattttctaatttatttgcgtagaggtgtttatagtatgctctgatggtagtttgcatttctgtgggatcagtggtgatatcccctttaacattttttattgcatctatttgatttttctctcttttcttctttattagtcttgctagtggtctatcaattttgttgatcttttcaaaaaaccagctcctggattcattgattttttgaagggtttttgtgtctctatctccttcagttctgctctgatcttagttatttcttgccttctgctagcttttgaatgggtttgctcttgcttctctagttcttttaattgtgatgttagggtgtcaattttagatctttcctcctttctcttgtgggcatttagtgctatacatttccctctacacactgctttaaatgtgtcccagagattctggtatgttgtgtctttgttctcattggtttcaagaacatctttatttctgccttcatttcattatgtacccagtagtcattcaggagcaggttgttcagtttgcatgtaattgagtggttttgggtgagtttcttaattgtagttctagtttgattgtactgtggtctgagagacagtttgttataatttctgtttttttacatttgctgaggagtgctttaattccaactatgtggtcagttttggaatacgtgcgatatggtgctgagaasaatgtaaattctgttgatttggggtggagagttctgtagatgtctattagatctgcttggtgcagagctgagttcaattcctggatatccttgttaactttctgtctccttgatctgtctaatgttgacagtggggtgttaaagtctcccattattgttgtgtaggagtctaattatcttcgtaggtctctaaggacttgctttatgaatctgggtgctcctgtattgggtgcatatatatttaggatagttagctcttcttgttgaattgatccctttaccattatgtaatggccttgtttgtgtctttcgatctttgttggtttaaagtctgttttatcagagactaggattgcaacccctgcctttttttgttttccatttgcttggtagatcttcctccttccctttattttgagtctgtgtgtgtctctgtatgtgagacaggtctcctgaatacagcacactgaggagtcttgactctttatccagtttgctagtctgtgtcttttaatcagtgcatttagtccatttatatttaaggttaatattgttatgtgtgaatttcatcctgtcattatgatgttagctggttattttgctcattagtttatgcagtttcttcctagcatcaatggtctttacaatttagcatgtttttgcagtggctggtagcrgtttttgctttccatgtttagtgcttccttctggtgctcttgtagggcaggcatggtggtgacaraatctctcagggtttgcttgtctgtaaaggattttatttctccttcacttatgaagtttagtttggctgkatatgaaattctgggttgaaaattcttttctttaagaatgttgaatatcggcccccactctcttctggcttgtattgcccagatcaatgtcctgtagtttttcctcaatcttgtcttctagtagtttacagtatctggtgttatgtttaagtctttaatccatgttgagttgcttgagtatatggtgtgagatcagtgttcaattttattctttagcatttggatatccagttttctcaccatttatttaagagactgtcccctttccattgcatattcttggtacctttgtctaaaatcaattgtagttgcatgggttcttttccagctctctgttatattctrttggttgatgtgtccatttttatgccagtaccatgctgttttaattactattaatttgtagtatagcttgaaatcaggtaatgtgatgcctccagctttcttctttctgctaattattgccttggctatttgggtatttttgtggttctatatgaattttttggggatgacttttcctatttctaagagagataacattggaattttgatagggatttcaatgaaaccataaatttctttagatagtatggacattttaacaatatcaactcttccaatccatgcatatggtatcycttttttatttgtgtcttcttcatttttttaattaatattttatattttttggtgactttcacttttttggttaaatgtactcctaaatactttatttctttgatgctattgtaaatgggtttatttttaaaatttctttttcatatcatttgttgttaatgtgttgaaacactattaatttttgtgtgttgattttgtatcctgcaactttactgaatttaattatcagttctaagagttttttggtgatgtgtttaaggttttctgtatgtaagatcatgccatcagcaaacagagacaattttacttcttttcttctttggatgtctttcatttatttttcttgtctcattgctctggctagtacttctcatactatgttgaattgaagtactgagagtgggcatccatatctttttcctgatcttatgggaaaatccttcaactttccactattgaatatgaggttagccatgcacttgtcatatatggacttgtgttgaggctagttattagctccactatcaggagcagcaatttgcaggacatgctaacaagtctcatccaggcagaaacttggacttttgagtttcatccctttctctgccatgatcccagaggattaaacctctggaagtgcttgtgcactaatataatactggtactttttccagtggtctagagagagactcctgtatacttagtcctctctgctcccagaattggtaagttaagtagatagctgtggggaamcttagagttagggtgttaatgtgtggtctaaatcctcctttccacagggagaagctggatgttggggattcattctcaattgtatggtgtagtgcctgggtgaggttggtgctgtagctttttcttcccagtctatgtggatattttctttgttgctcagtacatagaagtctctcaacttgtttctgactttctctcacagggaattgatctgtgaatagatatttatttggtgtatccttgggtggaagaagagactggagcctcctattctgcaatgtccctattgtgacactgagaattgcaaacccttgattcttgcttataatgtatttatgtctctaatttacttatttctatttctatcaattaagattgtatatatacaaataagaaaaaaaattaacatggcttaaacaaataatgtgtttatttatttcacatacagggtgtcatgttgggcagtgcagaactagtactgtagctctgaagcatcctagaactaggtgcctgccatttttgatccccacgcttacaacatgaaccttcatcttgattatttttttttttgagacaggatctctctttgtcatccaagctggagtgcagtggcatgaacatgcttcactgcagccttgacctcctgggctcatgtgtttctctgtgtcagcctcccatgtagctgggaccacagatatgtgcaattcacctggttaattttttgatttttatttttttttttgagaggagtttcactctgtcacccaggatagagtgcagtggtgtgatctcggctcactgcaacctccgtctcctgggttcaagtgattcttatgcctcagccttccgagtagctgagattacaggcgcatkccatcacgcccggctaatttttgtgtttttagtagagatgagatttcaccatgttgcccaggctggtctcgaactcctgacctcaggtgactgcctgtcttggcctcccaaagtgctgggattacaggcatgtgccaccatgcctggccaagtttttgattttttttttagagacagggggtctcacttgttgcccaggctggtgtcaaactccagaactcaagtgatcctcctgccttggcatcccaaagtgttgggattacaggcatgagccaccacagatggacttgttatattcttaaatattcatgttccaaggtgatatctatatcacctctaccttcatatatgtgttttgagtaaaaaggagagaaagtgccatcaacaggtacctgcttatatgtcatagacaagaaatatgtttcatggccaacacagctccaaaagatattcagaaatagaatttttaggcaagcaatggataagtaggaatgggaaatgaactattttacattctctgccacaccgtgcaattgttgtagttttaatactgcactctgtacagtttccaaacttccttatctttagaacaacctgatatattttggattttttgtaatttaatatgctggcaaactaccaaataattaaattatgaaataattttttaggaaaagcacaatcaacagtctgaatttactgttgaaagcttgatagccactgtaactgatatgtttggggctggaayagagacaacgagcaccactctgagatatggactcctgctcctgctgaagtacccagaggtcacaggtatgatgataccataggtgagcagggtgattttcagaaaagatgttgggaagacactgctattgtcctcaatcttgtttctcttagagaagcttcattattgaaatttctgtgccattggctctaagttgtctaaatatgatgaagggataagaatgagacaaatttgcacaatagggaagagggactgagagaggtgaagacagtgtgatcagtagcaaaagtaataaagccctggattttagtgactaaatacttttaataaagtgtctagatttcatgggagacgatttgtagcaggcacaggcatgatgaattggcctaggattgtatgttggttttctaaagaacagaccactttgttgcagtttcttttttgaaatgagtagaaattttatttcactaaaagccatgtctacaaaattccattttccagcagaacagaccactttgagtaatagatatgctctttctttctttctttctttttttttgagacagagtctcactgtgtcacccaggctggagtgcagtggtgcaatcttggctcactgcaacctccgcctcccgggttcaagtgattctcctgcctcagcctcctgagtagctgggattacaggtgtacccaccacacctggctaattattttgtatttttagtagagacggggtttcaccatgttggtcaggctaggctcaaactcctgatctcaaatgatctgcccaccttggcctcccaaagttcttggattacaggcatatgccactgtgcccagccaggtatgcttctatagatcttcccttattctgaaaatgtagtgttttaatgctgggacagtaaagacagaaactctttttatttttaatttttattattggcaattcttttgtggttggtttgatgccattttttaatgttttggtaaatttctatttttatagacttaggggtacaagtgcaattgtgttcatgaatatattccctagtggtgaagtctgggctttcagtgtacccttcacctgaatagtgtacattgttcccaataggtagcatttcatccctcacctccctcccacctttccaccttttggactctccagtgtctattattccactctgtatgtctctgtgtacccattgtttagctcccatttataagtgagaacatgtggtttttgactttctattttgagcatttgcacttaggataatggcttctagttccatccatgttgccacaaaagacacgatttcgttcttttacatggctgagtagtagtgcatggtgtgtgtgtgtgtgtgacacaccatagaatactagatgcagatttttaaatcccacacataacaattttaatccattcatctgttgatggatgcttgggttgattttatgaatttgccttggtgaatagtgctgcagtaaacatatgaatgcagatgtcttttcgataaaatgatttcttttattttggatagatacccagtagtgggattgctggatcaaagggtagttctatttttgattctttgggaaatactatttattgaagtgtatagtggatattctagaaatgtcatgagatagcctgagaaaatctgtatagtctgggaagtattttaaacacttaggtgtataataaaggtgtatgatatttaagcagaaaatgtgcctgaggaattttatgattatcaaaatctgcatctagaaaaatggtacttgtcaatattttttcttagggtcaatagttttatcttttacaagcaacttttttttttcttcaacttttatatttatctatgagcagattctggctctgcatarcatattagccacacacttgtttttctggggtcagaatcacactgaagtgatgataaacatattacaaatgagaattactcctgttaaagttggagtataaccatcaagtctttaacaaacttctcagacacagagagcagatagaaggatgataaccaatttggcagagagattgaagttgcaacctaagggtcataagaatttctgttgctatagtccccataaggctgagtattcaaaagaaccaagacccaaagaacatagagggagaatgaggcagaaaacagaaaattctccctgcctagtttccctccacaactccatttgtcaactaattgtttttctccacagaaaagggaggttcactctctagagaaactgaacctaagaggctcactcatggacaacagacagagactgggaaagagtgaggggttaagtaagagtccacttgaattctaaggcctttagcgcctttttctatcttgttcctaaaatacagcagccaggtgtaaactccagaggacaagtagcaccagtggaaagacctccatttttcaccatttagatagaaaattcttaccaaatgtccagcaaagtgaatgaaatggaaaatattcatccaagacaccagaccatggggaattttagaacatcagagttaaagggaaagtcataaaaacattcagagataaattaggtcmcctgtgaaggatcaggaatcagaatggcattagaattctcaagagcagctgtcatcttgtgtatttgtagataaagaatattttcagatctgcatttggcaaaaaatttttgccctttgtgtttattttcttagaaagatactagagaatattttccatccaaatgtctgaaaccaattcaggggaaatcatgggctgcagggatcaggagatctcatgtaggaggatggaagtgtcagggaggctgctggataccaggtctagaaaacaaatgctttagaatggaccaggtggatcatggaggtgtgagggaagacattaagggcaaagaaaagttgattgattatttgattatttttagtgtttagaaaattattagtaagagtttgaaacatttctgagcatttgcagtaattctaaattggcatatgaaaattagaattgaaatggacacacaagtccaagaatatacaaaaaagagacataattacagctgtcccacttgtggtcaatgtttatgaaataataatggtgtgaacatgagtattaatataataaaaatgtgatataaatacattggggaaactagagtgggggaagtgtgaatgtgtgtgcatgtttctgtttgtgggtgtgtgtctatttgttatggggtgatgatggagatataagtcctcatctttcttaccatgaggttttagaaattttcaaagataaattaaaaaataaaaagagagtcagtatttagaaatatgaatataaacttcagaagaaacttctagaatgtttcaacatagtcacctttgtggagtgtgaggatgagagagaatatcatttcaagtttcaaataaacatatgcacacaatacacaaatccatccatacatatagatctgttagtagaattaaagttttaaaacattatatgttattctgatacaacattaatttgatttttttctttcttcaagaacagtaatttcttgagtttataatgtactaaatatttatattttgaagtattttatcatttatatttgtactgattatcttgtatgctaatatgtaggtggttacagatttatcttaatacttagcttgtaggagagttggatgtatctataatgtagtaatttcttccctaagtctaggtgtactttcagtcctataagtttataatgatgttgggaccccttccttatgcttcttgtaacctgaattgctacaacaaatgtgccattttcctccttttccatcatttcttacttgtgtcttatcagctaaagtccaggaagagattgaatgtktagttggcagaaaccggagcccctgtatgcaggacaggagtcacatgccctacacagatgctgtggtgcacgagatccagagatacattgacctcctccccaccaacctgccccatgcagtgacctgtgatgttaaattcaaaaactacctcatccccaaggtaagcttgtttctcctacactacatctccatgctcttcaagtccccaaattcatagtatagtcccaatcctctaacaacacatgatgagagaagtgtaaaattcatacgtggggcagctttctggactctgctgtttccattccagtttgggcctatgaaggtttataacaggtctcagtatctagcagtgtatgtcttccaaatttgttctgcttctttagtattttttttttgtggctattctcaggtgtttacatttccaagtaagtgttgaaagtatcattttgtcaatttcccaaaacactrtgctgggatttttatcatgatgacattaaatctttagatcaatttagaaataattgatgtcctgacaggttgaatctttcaattcatggatatgattatgctctttatttatttgggctttcttctattgtgtcagtaatgttttgtcttcagttcagtggctttctcatgtattacrttttttttctgaaatgatatttctatgtaattgtaagttgtgtatttaatatataatataaaatatatataatatgaaataaatatatataatattaaaaatatattttcaaaacagagtcttgctatgttgcacagattgatcttctgggctcaagcaatcctccacctcttcctcctgagtagctgggattagagatgtgtgccactgcacctggcttttaaataatatactttaaaaaaaatgccttttccatttctttgtttctggtacatggaaatataattgactttattattttgatgaccttacatcaagcaaatttacttggcattgctaattttttgtttgtaaatttatttgtaatttctatgtattctgtgttctcttttaatatttattttatttcttatttttcaattcttataactcagttttctctttattgttttatttcactggttaggatttccaggacagcgttgaataaatcatgatggtgggcatccttgtttcatatatgatgttcaggatgggtggagatttaacatctcaccagtgagaatgatgttttatgtatattttcataagtaaaaaatcagattagagaaggttgccttctacttttgatgactttttttggtcttgaatgtgtatacaatttgatcaaatggagtctctgcatcaatcgatatggccatatattttgtcctgtctatagatataatatatatattagttaaaatacacacaaatgtgcacacagagacatacacagctgggttttatttgctatgattttcaggrtgtttgaacttatatttacaagagacattggtttgcaatttttcttcctcaaaattttcttgtcagatttctgatattgaggaaatgttggcttcrtaaaataaggaagataatgttctgtattgtggttgtttttataatcttttctcccttctctattctttttgtgctcacttagttctgtctttggagtgactcataaattttggttaagtgccagttatgatgtatgaaaaaatgcagaatgtcagatgaggttcatcttcttccagaaagggttcatccctcccatgctaggcagacagaattatgcaacaccttctaccttcattcagaattagatatcaacacagtcaaaaaaaattttttttcaattttttttttattatactttaagttctgggatacatgtgcagaatgtgcagttttgttacataggtatacacgtgccatggtggttcgctgcacccatcaacctgtcacctacattaggtatttctcctaatgttatccctcccctagccccaacatcccccacaggccctggtgtgtgatgttaccctccctgtgtccttattgttcaactcccacttataagtgagaacatgcggtgtttggttttctgatcttgtgatagtttgctgagaatgatggtttccagcttcatcmatgtccctgcaaaggacatgaagtcatcattttttatggttgcayagtattccatggtgtatatgtgtcatattttcttaatctagtctatcattgatggacwtttgggttggttccaagtctttgctattgtgaatagtgccacaataaacatacgaaacacagtcaaaaattgactgtagccatcaaaaattgactgtaacctctctgagttcccccatgcctgcaagcctgagtaatttttgtctcarcatcttttccagtgccttctaacacatggtttctgtgtttattgagactttttagttgctattctgcaagctgctccattccacttgaagcgagtacatattgccattataaagaaataaaataatgaaaatttaactttgagaggaaaaaggattggagtttgataaggttgaaatcactattgccatcttatagggaagagggaattctgaatgtctgtattgtgccatatggaatccactagccacaggtacctattgagcaccggaagtgtaatgaatgcaactgaggaaatgaatttaaaattttatttacttttcattactttaaatttaaatacaaatagccatggatcattcatggctaccgtgctacagaacacatatctgattgtttaattttctgtaatacagggttagaaatatctcattctcaattatgtaatattaaaagcctgagtagttaaaaaccatttaaggtgggtgtaatttcatttggctaaacatttacttgcgtggagtgaatgtatttattttccttatttatcatactttgtataaatattaatgttttgctaaagaaaaggccaggtgtggagattcccatttgtaatcccagctctttgggaggccaaagtggaaggatcatttgcacccaggagctggaggccagcctgagcaacatagtgaaactctatctctacaaaaaataaaaaaattagctgggtgtagtggcatgtgcctgtagtcccagctacttgggaggctgaagtgggaggattgctggtgtccaagaggttgasgctgctgtgagctatggtcgtaccactgtactccagcctgggtgacagagcaaggccctgtctcaaaaaaaacaaaaaaaaaagaggaaagaaaagaaatatcatgtattcaattatatggtatctccccactctccacattattgggagtgttagaaaatctgtagcaactattatgtagcataatatctttctagaatgaatatatgtgtgtgtaggtatayagtatacatataatatatggaaatgtgcatacatctacattttaatctatacatttatctgcatttatctatcatctatctacctatgtaatctaatctgtcacatttaacacctaagtacttcagtatataattcccaaaaacaaggactttctcctacataataataataacattcacactcaaggaattattatcaatacattaatattatctaatatcttataactacattttcccagttatactaaaatatctcttatagcttttttttgatggacttcctgtagtccagtcaaggaacaagcttttaatttggttatcttgttttgttaatccttcttcatcacgaacagttttttttagtttgtttcactttaatacactgacagtttttaaaagtcctgtccccttgttatgtaaaatgttgctcagtctggttttgttagaatttttttttgacaattagattccagttatgtgtttttggcaagaaagttacataggtgatgttatatacgtgccattgcatcatatgtgcggtccacattttgtaagcctgtatctgctaggtctctccattgttggggttctgtttttcatatgcagttaataaaaagatggcatggtactttaagatcctgtgaatattactttcccaaataatttacccagtagttttaaagttaattgatgatccttgcccgaatctatggtcctacctgaatggctgcaaaaatgatgatttttctaaatttatccttccttctgtgttttttaggttggattcatctctgatgaagagttcccccacgtgttttaactaaaagaaacatatagcatttctgtgatcaacccctcaataaattttagtgtacttgttgatatcatctcagaagtcatttttaattagatcagacctccattttaaaaaaccytatgaacagattccaaattctcctcacttttttttttttaacaaaagttttattggagatagaaccaccatgtacacagggaaaagagcacaaaaattcaactgatacagaacaacaactgaaagtcacaattacccaatgtagtttgcaattacttttcagtttcttaaacagctcccctcaacttktttttttaacagtcttgctaatttttcagctgaaacagcatcaagttttccaaaaattaagagcctcgggaggggacccgctttcaagatactgaaggtgacatcaagagtctcctcctaacaggaccaactctatctaaaagttgcttacgagtaacttgaatcttgtgtaatagtctgcatctcacagaccatcatggatgagttagaacactgttgttgatggtccartatgaagagagggcaaccaaatagctgtattcgcttgtcagctgagctcatataaagaagtcagtgaggagctgagaaaatataggcaatggctgctcaataagaattwtaagttccgaataccacatataggtagacaccagtgtgcaagttgatgcaactagaaagaaacagatgactttttaaaatacctggccacaggtctttgagaactcaagaaaataatcaacagtagacacaagagtcaaaaatcttctcaggttgaagattaggacatgggtaatcttcctaacagctccaacaggcaaggaaatatgctgtggcaaaaagcattaagtagttctgatttttaaaaaacaaaaacaaaattttctgcttctcctcccttcaaagcttcaaggaaatagaaacaaggaaacaaaacaaaaacraaaaaaaccagtgatggtaaagagaagccttttgcttgaattatcaattcgaaaaacagtaattttgccattttgtatatataaacaatcttgggacattcttctgaaaactaggtgtccagtggctaagagaactcaatttcaagcacttctgaaaggaacaccagcatgacccagaatctcaaattcccaaacaggggctgcgtgggaaaaatgagggaggacttttgtatctagggttttagcaagttaaaatgaagatgacaggaaaggcttatttatcaacaaagagaagagttgggatgcttctaaaaaaactttggtagagaaaataggaatgctaaatcctaggaagcctgtaacaatctacaactggtccaagttgaagacaaaactgtccaaacaacatttaaatctaaagtatgttgaaaactagttgagaagtttttgctcctgtaacaatttacaaaacacgttcattttggtctcttttgcagttttcttattgtattcatttttaatataaagagttggatttttctcttctatgatgttcctctagtacaactgatcattaattttctattttagctatttttataagtacttgttaatcagcacagttaacttggggctaagtcatatatacacatcccatactcataaatgaaaatttttaggatgtgaatatacaagatattatgtaagcaactgtccccctacttgaaaacttgtttccaaataatgttttttaaaaacatccctttcagtgtaacagaacattacctagtaaaatatcaatagctatgacaattcatttctcttttcaagggaaatcacaaaacaggtgaacaaccaagtcaagggtggtttttctgtttgataaatacatccagaactctgtacagtaaataaagtttgcatgcagtttaagtatctttaaatgacattttaagtaaataaaccttttgcttcataattagtggtgtataagaaccctccccactttttaatagccacagggatctctttcccagttccaaagaggaattaatgaagaccaggtatgtttagaggcttctatttaaaaactgtcttctggaagtcctagccagagcaatcaggcaagaggaagaaagaaaacgtattcaaataggaaaagaataaatcgaaatatctctcttcactgatgatatgattctacacctagaaaactctgaagactcttccaaaagggcctctggaagggataaatgaccagtaaagtttcaggatacaaaataaatgcacaaaaatcaatagcatttttrtatatcaataatgttcaagctgagagccaaatcaagaacgcaatcccatttacaatagccacaaaatattaaatccctaggaatacatctaaccaaggaagtgaaagatctctttaaggaaaactgcaaaacactactgaaagaaatcatagatgacaaaaacaaatggaaaagcattccattctcatggattggaagaatcaatactgttaaaatggccatactgggccaggtgcggtggctcatgcccataatcccagcactttgggaggccaaggccagcggatcacaaggtcatgagatcaagaacatcctggctaacatggtgaaaccccatctctactaaaaatacaaaaagttagccaggcaaggtggcaagtgcctgtagtcccagctacttgggaggctgaggcaggagaatggcgtgaacccggaaggtggagyttgcagtgagcagagatcacactattgtactccagcctgggtgacagagtgagactctgtctcaaaaaaaaaataaaataaaaaaataaaggccatactgcccaaagcaatctactgattcaatgctattcctatccgactaccagtgtctcttctaaaatttatatggaaacaaaaaagcctgaatagccaaaacaaacctaagcaaaaagaacaaagctggagtcgtcacgctaccagacttcaaactatgctataaggctacagtaaccaaaatagcgtagtactggtacaaaaacagacacacagaccaatggaacagaatagagaacccagaaataaagcagcatacctacagccatctaatcttaaacaatgctgacaaaaaacaggcaatgggaaaagactccctattcaataaatgatgctgggatggcaggctagccatatgcagaatgaaactggaccccatcctttcaccatatataaatatgcactcaagatggattaaagttttaaatgtaagacatcaaactataagaattgcaaaagaaatacctaggaaacaccatcctgggcattggccttgggaaagaattcatgactaagtcctcaaaagcaatcacaatgaaaaaaaattgatatgttacttaaaattgataatttagttacaaattaaactaaagagcttctgcatawcaaaagtaactattaacaaagtaaacagacaacctacagaatgggaggaaatatttgcaaactatgcatctgacaaaggtctaatatcctataaggtaattaaacaattgaacaaacagaaaacaaataatgccattaaaaagtaaaatacatgaacagacactgctcaaaagacatacaagtggccaataaacatatgaaaaaatgtttcacatcactaaacatcagagaaatgcaaatcaaaaccaaaatgggataccatctcacatcagtcagaatggctatgattaagaagtcaaaaaacaatgcatgatggcaaggctgtggagaaaagggaacacttataggctcttggtgggaatgtaaattagtccagctactgtggaaagcagtttggaggtttctcaaagaacttaaaagagaactacaatttgatccagcaatcccattactggatatatttccaaaagaaaataaatcattctactaaaaagacatgtgaacttgtatattcattacaacactattcacaatggcaaaggattggaatcatcccaaatgcccatccacagtggactggataaagaaaaggtggtacaaatacaccaggaaaccctatgcagccataaaaaagaatgaaatcttgtcctttgtagcaacatagatgcagctggagtgaattaacgcaggaacagaaaaccaaatattgtacgttctcacaaggaggagttaaacatcagtactcatggacataaagatggcaacaataggcactggggactactagatgggggctgaaggggaggaagggttgaaaaactacctgttggatactgtgctctctactcgggtgatggaattatttgtaccctaaacctcagcatcacacaatatacccatgtaacagtcctgcaaacaacaacaaaaaaggtaatccatgtgtgaggtgtgtgaaaactgaagtgatgaaatacagcagcaagtggggatgtacaccagggtccaagcttgatgataaaccgggattcagaaggctgcccccgagtactcaaatgctcaggacttcaagtgcaattaattggaggggacttcagcaaagtcactgccacttgccttaaagtcatactgcttcttactaggtctgtctgggtgggaatgtaacttctttggacctcaattttcttatctattgataaaagagattggactaggtgatttccatcacttcttcccactctttgacttctttataacttagtttgtctgttttgctattttcagggcaygaccataataacatccctgacttctgtgctgcacaatgacaaagaattccccaacccagagatgtttgaccctggccactttctggataagagtggcaactttaagaaaagtgactacttcatgcctttctcagcaggtaatagatattcatttccatctgtccttcagggcacatgatacctttttgggatcagttgactcttacatgatgccacctctgaggtttggctgaattgctttgcagatcattagcaccattccctatgccyatgcgatttccctgctgatgaacatccccrttattgggccaggttagtggggctttggggagttgatccagtttttcaaactgaaaaagctagaatgtaggttaatttaattctgcctctagatacatcactgagctacccaagagctcttcttaatgggtgaaacttatttagacatttctcatctgccatgagaaaagtatctaattccacaactttgaatatcttccctgtggtgtccctagctccctagactgagctctggagatacaagtatctgagagcagagaatgggctcttaagaggctcactcctgatttagagaagtagacaagtaaacagatcattgtaatctagtaggaggaaggctgccagaggggaaagcgcaggatgttggggagctcagtgggggaatctgcctgcttcctgctcattcataggccataccacttccaagaggaaggaaacttaagctgcctcattgcagcaggaaacaggacaagaagagaaggcaaggcacttttacagaggtaatggaccatagtagcaggacattttctgtagatctagggggtcagaacctaccaacaaatttcagggtcaggaaaaccctgggaatgtggaaggatagtctgcaataattccagagcaccttgatctccctccactcatgatcatacatcttggatattcaatctctacagctaaagtgtgtggtgagtctgtggacatagagttcccttcattttttcctctggcttttgatccctgctttggatctggcactgtatacactgagatgtcaagaactaaggccttcttttaaggatttcacgttttagcaagatagaaaagtaaatacacagataatagaattcccggtgatctatgctccagtggaagcatgaatatgatgaggaaacctagagagggtgagtttctattgactagggatcacagaaatcataaagaggaaatgacatggggcatagcttctgaaggaagcataggagtagagctttttaggcagatgtgacagcaagagataaagcttgaaactttgtggtgtgttggaaattgatgaagaatggatatgcctagagctgagagtggaggagatgaagaatggaaggagtgatatagaacatcagactgggaacagaatgtgaagagtcaggtcaagccatttggcctttatcccataggacagatgggtgttgtttaaagttgtaaaatgagagactgacakgtttagacatgtacttttgaaagtacactaggaaaaaaaatctttggctaaacattgtgccagaagtacaaaggggaacacactatatgagccttctcttttcagcccatcttccctgtgaatgcatttctagaaaaagactgatggaaacttgtagtgtcaaaagagcagttataacgtgggaacacttagtgaagtgcatggcatagagctgatactccataaatatttgttgagtgaagggtgcctagtaaaataagatattaagtagataggaagtgtattcattttygtttttctgtgtatccagccatccttccagtcattctgccttygatccatccatctatttaatcatttatcaaatagttactgcatactctttgtgactgttcatgacctaatgttcaaggaacaaatcccctatgtctcttattttcaggaaaacggatgtgtatgggagagggcctggccckcatggagctgtttttattcctgaccaccattttgcagaactttaacctgaaatctcaggttgacccaaaggatattgacatcacccccattgccaatgcatttggtcgtgtgccacccttgtaccagctctgcttcattcctgtctgaagaagggcagatagtttggctgctcctgtgytgtcacctgcaattctcccttatcagggccattrgcctctcccttctctctrtgagggatattttctctgacttgtcaatccacatcttcccattccctcaagatccaatgaacatccaacctccattaaagagagtttcttgggtcacttcctaaatatatctgctattctccatactctgtatcacttgtattgaccaccacatatgctaatacctatctactgctgagttgtcagtatgttatcactakaaaacaaagaaaaatgattaataaatgacaattcagagccatttattctctgcatgctctagataaaaatgattattatttactgggtcagttcttagatttctttcttttgagtaaaatgaaagtaagaaatgaaagaaaatagaatgtgaagaggctgtgctggccctcatagtgttaagcacaaaaagggagaaaggtaagagggtaggaaagctgttttagctaaatgccacctagagttattggaggtctgaatttggaaaaaaaaactatgtccaggagcagctgtaacctgtagggaaatactggaacaatcatccataagagggatgaacattaagtgtttgaattcatgctctgcttttgtgttactgtaaacacaagatcaagatttggataatctttttcctttgtgtttccaacttagatcatgtctaaatatatgctttcatatggctaatcatgtgttaatgactgttatttttctcttccaaacaagagcaaaatctccagaaatcctcaccaggctttattttttttctattttgcactgcatacttttattttactgaacataaatgcaatggtaattagatgctatgatcctgaaattattagccttatgtcaactctaaagcttaaacaagtgaacaaatcatacacatcaaattctagtcatcttttttccttccttctgtcttgaagtgtatgaaatgagaagtgacacattaaccttttcccagctcatctccaagagaaagtcctttatacttatcatgcatttgtaagataactcatgtgtatagttttataaacacacacgcacatatgtctgcataggtgtatatttacatataatatatacacatgtatatatgagattgatagtggttctttaatataatgagttcatattacacatattattatattatacaacttgctcttttttttaacttttattttaggaggtacacatgcaggtttgttatataggtaaactcatgtcacgggttttttgtacagattatgtcatcacccaggtactaagcctagtactcaatagtgatttttttttgctcctctccctcctcccaccctccaccctcatgctgtccctagtgtctgttgttcccttctttttactcatgagttctcatcaattagctcccacttataagcaagaacatgtggtatttagttttctgtttctgttagtttgctaatgataatggcctccagatccttcaattttcctgcaaaagacatgttttgtaataaacaatatgccaggaaaacttccaaggtagtagaaacctgacaagtcatttcattgggcagattacggaagaaaatatgaaatggctattaaaagtattaaaatagcttaaaaataaaaagtatacattaaagctacattacttgtagtattagcagtaaaacagacatttccttattgaagtaatagataatatagagcaactttttcaccaacactactatcccatgactgtgttgagcttaaagcagggagtgagcagtggttgtattagcaatgttgcccgaagttaccctccaggtggattaaagattctctaagttaagtgaaaatcataggcattaatagtgataagagtcttatgatatggagtctttttctagtgttgtgggaaatgctgtcaatagcatgaagccatgaagccatcaacttctcatcctggtttgcagtttgaatgtctctggttatgggcattgggaggtttggtaaattttctgtgtgctccacacatcaggaatgagactcatcccttaaaattaatctagtttcagattatagggtttcaggaacagatcagttcccagttttactaatttcatagaagaaaatgggattagagaaatctagaagaattcaggatctagtctagtctgtagatagataacaagaactagaaaacaatgcacaggtctacaatccagtaacagatgtaacttttctctacaaacatactttttctctctacattgatcacagaggaatctcagatttgttgtttatttcttttttttaacttttaggttcaaggtacatgtgcaggtttggtatgcaggttaatttcatgtcacaggagtttagtatacagattattatttcatcacccaggtaataagcatagtacttgataggcagtttttcgattttcaccctccatcgtcaagtaggccccagggtctcttgttcccttctttgtgcccatgtgttctccatgtttagctcccacttataagtgagaacatgcactacttggttttctgttcctgtgttagttctcttagaataatggccgccagctccatccatgttcctgcaaaggatgtgatcttgttcttttttatgtctgtgtagtattcctcagtgtatatgtacacattttctttatccagtataccattgatgggcatttaagttgattccatgttcttgctattgtgaatattgctgcaatgaacatgtgcatgcatacatatgtctttatggtagaacaatttatattcctttgggtagtatatacccagtaatgggatggctgagttgagtggtaattgtgttttaagttctttgataaatcacccaagtgctttccaaagtggctgaactaatttagattcccaccaggagtctataagcattcctttttctctgcagtcttgctagcatctgttattttttgagtttttattatgatagccactctgactggtgtgagatggtatgtcattgtggttttgattggcacttctctaatggttagtgatgttgggcatttttaagtgttcattggctgtatgtatgacttcttttgaaaagtgtctgttcatgttctttgcccactttttaatgggattgttaattttttgctttttaatttgtttaaattcctcatgggttctggatattagacctttgttgggtgcatagtttgcaaatattttctcccattctgtaggctgtctctttactttgttggtagtttcttttgctgtggagaagctctttagtttatttaggtctcatttgtcaatgtttgcatttgttgcaatcacttttggcatctttatcatgaaatctttgccaggccttatgtccagaatggtatttcctagattatcctccgaggtgtttacagttttaggttttatatataagtctttaattcatcttgacttttgtatatggtgaaaggaagggatccgctttcagtcatctgcatatggcttgccaattatttcagcaccatttattgaagagggagtccttttcccattgcttgtttttgttgactttgttgaagatcagatggatgtaggtgtgtagcattatttatgggctctgtatgttgttccattggcctatgtgtctgtttttgtaccagtaccatgctgttttggttattgtagccttatggtatagtttgaagtcaggtaatgtgatgccttcatctttgttctttttgcttaggattgccttggctattccggctcttttttggtttcatataaatttagcatagtttttttctaattctgagaagaatgtcattgatagtttatagaaatagcattgaatctataaattgtgttgagtagtatggccattttaataacattgattcttccaatccattagcatggaatgtttttccatttgcttctgtcatctctgatttatttcatcaatgttttgtggttttctttgtagcactctttcacttccctggttagctgtattcctagatattttattctttttgtggctgttgtgaatgggattgtgttcttgatttggctctcagcttggatgttgttggtatatagaaatgctatgaattgttgtacataaatcttatttcccaaaactttgctgaaattgtttatcagatcaaggagcttttgggtacagactttgggttttctaggcctagaatcatatcatctgcagtgatagattgacttcctgtcttccaatttgggtgagttttatttctttctcttgcctgattgctctgtctaggaattccaataccatgtttaataggagtggtaagagagggcaaccttgccttggtcccgtttttaagggaaatacttctagcttttgctcattcagtatatgtggctgtgggtttgtcactgaccactcttattcttttctttattcctcctttgtctttctctctttctttttaaattattcttgtttattggataagatagctcttactattttgacatatgtttcttaaaagcctgctttgttgaggggtttttaacatgaagggatgtaggattttatcaaaggccttttctgcatatattgagataatcacatagtttttgtttttaattccgtttatgtgatgaatcacgtttactgattcgtgtacattaaaccaatcttacataccagagataaagcctaattgactgtaatggattagctgtttaatgtgctgctggattctgtttgctggaattttgatgaggatttttgcatcaatgttcatcaaagatactgacctgaagtttttttttttttttttttttttggtgtgtttgtgtctgccaagttttaatattgggaaaatgttggccttaaagaatgggttactgaggtatccctcctcctcattttttgggaatcatttccatagtgatagttcctgttcttttatgcatctggttgaattcagctattgatccatctggtcctgggcttttttttttttttttttttccctggttgataggctttgtattgctaattcaattttggaactcattattggtttgttcaaggatttgatttcttcctggttcaatcttgggaggttgtatgtttccagaaatttgcctgtttcttctacgtttcccagcttgtatgcaaagagtgtttatggtagtctctgatgacttttgtattcttgtgggtttggtggtaatgtcccctttttcacttcttgttgtgtttatttggatgttgtctttttattagtgtagctagcagtctattgatcttatttatcctttcaaaaaacaaactggattcattggtcctttatatggtttttcatgtcttgacttccttcagttcagctctgattttggttatttcttgtcttctgctagctttggggttggtttgctcattgttttactggttcctctaggtgtgatgttaggttttaatttgagatctttctaattttgttttgatttccaacttttattttaaattcaggggtacttgtgcaggttatgcagctttgtcacatacttaaatgtctgccatggtggggtagctgcacagatcattccattgcctaggtttaagcccaacatccattagccattcttcctgatgctttccctcctcccactcccaaccctctgacgggtcccagtgtgtgtttttcccttcatgtgtccaggtattctcatcattcagctctgtcttataagtgagaacacgaggtatttgattttctgttcctgtgttagtttgctgaagataatggcttccagttccatccatgtccctgcaaaggacataatcttgttcctttttatggctgcatagtattccattgtgtatatgtaccatattttctttatccaggctatcattgttggacatttaggttgattagatgtatttgctactgtgaatagtgctgcaataaacatacacatgcatgtatcttttatttatttatttatttttgagatggactgtcactctgttgcccagctggagtgcagtggcatgatctcggctcactgcaacctccacctcatgggttcaagcaattcttctgccctagcctcctgagtagctggtattacaggcatgcataaccatgcctggctaatttttctgtttttagtagagacagtttcaccatgttggccaggctggtctcaaatttctgacctcaggtgatccacctgcctcccaaagtgttggaattacaggcg

SEQ ID NO: 95849 - DNA, 80020 bp, Homo sapiens
ggatgcagatgggtttgtaaatttgatgttggtaagctgaatggggaattctgtcttgtagctattgtttcctttgttaggtaggccagaagtggggccatctaccgtaacaagagggagccagggttttcttttgttttgacttctatgattggatggatggttatgcacattaatatgaaaaggattctataagaggaagacattttgtgtgggtagggaaaaatgacttgtaacatcatacttagaagaaaatccccagtgccttatctggagggtctgcctctgactttttgtgccattcccccttgccaattcggcttcagtgatactggccttctctctgatattcaaacatgcccaagtgtattcctgctttactctctgtacacgtgtagtttctgcttggattgctcttcccccaggctggctagcttcttggcatttggttctctgcttaaagtgcctatcacttcggctgggtgtggtggctcttgcctgtaatcccagcactttgggaggccgtggcgggtggatcacctgaggtcgggagtttgagaccagcctcaccaacatggagaaaccccgtttctactaaaaatacaaaattagccaggcttggtggcgtatgcttgtaatcccaggtactcgggaggctgaggcaggagaattgcttgaacccgggaggcggaggttgcggtgagccaagattgcgccattgcactccagcctgggcaacaagagtgaaacttcatcccacacacacacacacacacacacacacacacaaaagtgcctatcacttcttcagacatccaattacccaatctaaaataactatcctgtcactctcatgccaccctattctaatattttgcaatttcccccttttcatcccaactcctggaatgtaagttccatatcaacagggatgtagtctgtctggttcattgctgtacagctcctgtgatagttcctggtatccaggagacattttaatttaatttttaatttttgtgggtacacagtaggtgtatatgtttatggggtacatgagatgttttgatacaggcatacactgtgaaataaaaacatcatggaaaatggggtatccatccccttaagcatttatcctttgagttataaaccaattatactccttaagttatttaaaaatgtacaattattattgactatagtaaccctgttaggcaatcaatagtaggtgttattcattctttctaaccaggaggcattgaaaaaacaaagaaaaaacaaaataaatgtagacccttaaataaaagtgaatgaacaagagtgttcacagccactttgaagggagggtttgcacaacggcaaagacgtgccaggaaatgcaccaatgcacttttattaccaagtgtggggccagatgtcagttgagatgtgtgttctttgagaatcagatgaagttttcttgagctccatttcgtgtatttggacaaattctctctcttgcctgtggagcagaaggtccaaggaacaaagtttctagagaaaaacaatgaatggaagaaagatttggggaggtgggccacagttgaatttgtattagtccattttcatgctgctgataaagacatactcaagactgggtaatttataaagaaaaagaggctaatggacttacagttccacgtggctgggaaggcctcacaatcatggcagaaggcagaagatgaaaagcatgtcttacttggtggcaggcaagagagagaatgagagccaagcgaaaggggtttccccttatagaaccatctcatcttgatctcgtgagacttattcactaccacaagaacagtatgggggaaactgctgccataattcaattatctcccaccaggtccctcccacaacatgtgggaattatggaagctgcaattcaagatgagatttgggtgggggacacagccaaaccatatcagaattcaaaagaaggaacaaggaaagatttttcagtacattagggaaaaaccccataaaaagtgtttcaaaagtcaaagggaaagaaattttggaggataggttggtaaaggtcaaaaaaaattttttttttttttttgagatggagtcttgctctgtcgccaggctggagtgcagtggcatgatcttcgctcactacaacctctgccttccaggttcaagtgattctcctgcctcagctaccctagtagctaagattacaggtgtgtgccaccacacccagctaatttttgtatttttagtagagatgggcttcatcatgttggccaggatggtctcgatctcttgacctcatgatccacccaccttggcctcccaaagtgctgggattacagacatgagccactgcacccggccccaaaaaccttaagtagagtgagggtggcgggtgaagtggctcacgctctggcatgccagtaatttcatactctgggaggtcaaggtgggaggatcccttgagcccaggagttcaagaccagcctgagtaacatagcaaaaccctgtctctacagaaaattttaaaaaattagctgggtgtagtggtatgcacctgtagacttagctgctcaggaggctgatgtgggaggatcacttgagcccaggaatttgaggttgcagtgagctatgattgtgccactgcactttagcctgggcaacagagcaagaccctgtctcaaaacacaacaaaaagcaaatcttaagtagaatgaaacagctaagttttcgattaggagataggatttaagagtagctattaacagaggctacattttatcttgaaataatattgaatgaactaggagtaaaaatgttatcaagcaaatgggctcactgcccgttacacactaaagccaaaaactatggcacctgcctttgacgaaaggctttattgcaagtggtcagcaaggagacaggagtgggctcaagtctgtctccctgatttagggtctagggcaatttttttttttttttttttttttgagacggagtctcgctctgtcgcccaggctggagtgcagtggcgcgatctcggctcactgcaagctccgcctcccgggttcacgccattctcctgcctcagcctcccgagtagctgggactacaggcgcgtgccaccacacccggctaattttttgtattttttagtagagacagggtttcactacgttagccaggatggtctcaatctgacctcgtgatccacccacctcggcctcccaaagtactgggattacaggcgtgagccaccgtgcccggccaggtctagggcaaattttaagggatcagagagcaagggaaaagatttaggaatgttggcttggcagggtctgattggagggcttcaaattgaaccatttaacgtaaggtactgttatagaactgaactgtggtccacttgcctggctcaggaagacaagacttccacactgagcttttgcagctgtaggaattggggcagctcatgcttaagacccaaactccctgatggcttgcaggtaaggatttttaaaggcaggggtaaatttcaggaaagcagaaattacaggcaaagtcattgattaatacatggagtctatgtattgtttcgaccgccatctcaaagggtaggtaggtcaaaaggtggattaaaaggtaggtcatagatggattaaaaggttttctgatttgcagttggttcaggaggtgaagctttgtctaaaaatttggggagctgggtgtggtagagtgtgcccgtaatcccaaaatttctttccctttgacttgggaggctgagtgggaggatggcttgagcccaggagtttgagaccagcctaggcaatataatgagactccatctcaatttttaaaaattaaaaaataaaaatttgggatcagcagaaaagaatgctagctctgcttgtgtgtgtgacctcctccaggcccctaggaataaatttagaacaaatgaggcagcagagtgccagcacatgtgtttggtggcgcttggggtttctaaaaaacaactcagagacatgtgttaagatattatctctagtttttataaaggaaccaaacatctcctgaatctaacttcctgggctgttgttttaggctaccattaccttcttccttatcaagttgcttatttacttgtcagggctagctaggttcctggaatttcccttgaagcaactcaagatttccctttattcccatggttttttttttttttttttttttttttttttttgagacaaagtgtagctttatcacccaggctggagtgcagtgttacaatctcggctcactgcagccttgaccacctgggatcaagtgattctcccacctcagcctcccaagtactaggaccacaggcatgtgccaccacagccggctaattttggaaatgtttgtaggggccaggcacaatgtgtcacgcctgcactctcagcacttccggaggccgagttgggaggatcccttgaacctaggagttcgagaccagtctagataacatggcgaaaaaccgtctctaccaaaaaacaaaaacacacaaaaaccccaaaccaacaaaaattagcctggaatgggctaatgtccgacactaaaatgtccgggcgtggtggcacgcacctgtagtctcagctacttgctaggctgaggtgggaggatcaactgagcccaggaggtggagattgcagtgagcagagatcgtgccattgcactcctgcctggacgacagagtgagaccctatcttaataaaataaaatatagagactaggtttcgtttctattttttatgagacggagtctctccctgttgcccaggctggagtgcaatggcgcgatctctgctcactgcaacctctgccgcccaggttcaggcgattctcctgcctcagcctcccgagtagctgggactacaggcgcctgccaccgtgcccggctgttttgtatttttagtagagacagggtttcaccatcttggccaggctggtcttgaactcctgacctcgtgatccacccgccttgggctccgaaagtgctgggattacaggcgtgagtcaccgcacccggcttgtaaactcttaaattttgtatagacacaatcatacaagttgtgggagtcaaaatgaaggaaacgggtggttacatggtaggtatatttaatgccatacatcttaagaaattggaggtgggaaagggagccctggagagggagacaaaggaaatagttgaaaaggaatgcaaacaagaaaaggaggaattgaaagctgaagtgaaaaccagggacaagaaaagctccgctccttccttcactgcccactcgaatgaatgaatcctgtttggtttcctgaatcttccttctgctggccactccgcttggtccatcacttctttcagcttgcccttatcctaaacagctttctttaacccagtcataatcttaatttcctgttccttctctctcccgtcccacccacaaaaaagccctcctctttgtcattttgggggatttttcacttaagatgtgagccgcgcgctgcgggtgcggcgaggctggccctataaaaatgtttctgtttctgacatcctcgtgcagatacgcagacgtctctacctacaggatcatgggctagcgggtgctcaatcacagcagccagcgttggaaggcgccttgcaaagtattaacagcactatcaaactttaattgcgtagttcggaaccagatatgtgaggaaactgggttctccacgatcggccacctcgcccaatctcacaggatagttacaggctgagttcggcagcgggacccagtttcctcctgagagaggtccaggtaaaggtttacggttgccacaggtcagtcctgacgaaaaccgcaagctgcgccaaatctcgcgcagcggggcgggagggcgggtggggaatgtaaggtatcgcgagatgacaggattttcccgcgaaggagaagcgcgcttttttccctggcgggggatttggctagaaggctgggccggcagcggttgtgaggagttagctcgcggcattgcaggctctgagaggaggggacccggttcccgggtgagtgtccaggcatgccagcggaacggcccgcgggcagcggcggtgagtgaggaaaacctttygggcgcgggtggcagcctgcggggctgaggtgggcaagcatggaggctgcggcggagtttcggggagggagccgaccccgggcagggactgaggaggaaaggagggttgggaaactgcaacggtgagtggaggacaccccggaatcgcacgtattagcatgccggtgaagatttcacataggcaactgcattttcccgagcatcccgagttgtaaactgtggtccaggcgacttgtagacattgtgaagacttacggtgtcttctgagaggtgatgctggcgtcccctcggtcttcagcttttgctccagtgcatctcgggtgggagaaaggctgtttcttgttggagttgagtagttggtaatttttttaaaactgcaatttgaaagctttctcccccgtcaggctcggaggctccagcaatggttgaacaactggacactgctgtgattaccccggccatgctagaagaggaagaacagcttgaagctgctggactagagagagagcggaagatgctggaaaaggtaatttaggcatcaggttcgtcgtcgtgaaagcctgtggtaacctcggctttaacccggaggtgtggtttgtgttctttgctttcctatttagtgggctttttaataactgaaagaaaacagctttattacttgtcttttttgtatgtttacagatattgcctttgagaatcctttcgcaagtgctttgaatggtgtgtttctatgagatgtagtcttggtagtcccatcacttttaaatgagcatttcagattgcttgtttagccatgaaaagtctttcaaagtccatagtgagttttttcgtttgtcatccttatttcctttaaaaattaccttaaatgtatgtctgatggcaaacaggaatcgctaaaacctgcagaagtaatgtactagactgagggcaggagaagttagcatcaatcaaaggctgggctggaatccaagtctaatgatttccttatactgtagtgctgttttccacctaagtgatcaacttgctgtttgtttttcttttggtttcatggcctgtgtattgctacataagattctttagctaaaaatgtgccgtactttttcaatgacaagttgctgtagttttcttgtagagagcattttgtaagttactaaaaacagtttttaacctgaaaaattcttgtttattctaaagccccaccctgctgcttgattcatatgcaagaaaaagaatgatcgttgactcttaagtactgcctagtacgtggttttcttgtgctttattaatttattaaactctaccgatattatgatataggttattttttgttattttcatttacaaatgaagaaactgagggagaagggcacatagtaagtgttgaagtcaaatttcaactcaggctgcctgcagaatttctgtccttaataatagtgaattaactcatgattataaaactacttaagttggaaaataatgcattccaaaaacgagtaatgaggccgttggttccctgttatgtcaacaataatttttttgtcagcattgttaatacttcttgaacatttattaggagtcatgcattgttttgaatgctttatatgtatttactcattgaatcctcaactattctgtaaagtagatgttcattattactattactgctattaaacttactagtttaattactagtataaacaattgctattattgaactacacaaccaaataggttttattagtcatcttattttacagatgaggaaactgaggcacatagaggttgtttgggtgccacagttggtaaatggcagagctaacattccagtgtaggccatgtggttctagaatgcacattttttaactaccatgctatagttccactccagtaatactccttccgttattactgatgatctctggttgactataaccagttaaggtaatatattaacaaattttctttaagtaacatcaatactttttgcttcagggtagatgtgaattaayagaattgagaggtctgacctgaaccaccttttctcattctttgaattttcatagtactttattacacagaatttaccatgaccaaataagtaatgataaatacttcatactactttttgattctttctcactttgtttcttgagggtgcatcacttgctgttttgtttttgtaggctttgcacctggcacatagtaggcaatcagtaagtgcttattgaatagctaacgatgataaaatggtattttataatatacaagattatatacatatactaaatatacttattagctatataaccagatgaattataaagtataaattctggggcaagtgcccagaatggaatcaactgaagaagtctaagagggatgtgataattttgtcttgagtaatgtatcttcagttttatcttgtttcttcatatacccattatgagtgttgggtagggaaatagcatttaaagaaagatatgcctgagatatgacaacagtacattttcagaaggtattattcattcaaggaagaaacacttcacatttaaaaaagataagtcaaatatgtagtattttatatatttgctgaggtcaaatgacctgctacttttaatgacatttttaagcttatgaacaaacattttgcagttagtcctaaatttaataattatgcatcatagaacctaaagagtaatttttaatccttccattaaaaaagtatatggctgttttcatggcctggcatggtggctcacgcttgtaatcccagcactttgggaggccgaggcgggtggatcacctgaggtcaggagttcgagaccagtttggccaacatggtgaaaccccgtctctactaaaaatataaaaattagccagatgtggtggcgcatacctgcagtcccaactactcaggaggctgaggcaggagaattgcttgaacccaggaggcagaggttgcagtgagccgagatggcatcactgcactccagcctgggtgacagagcaagattccgtctcaaaaaaaaaagtatgtagccgttttcaatcttaatataagtgtgtaatttgctaaaacattagtgttgtggtttcgtattacattgtcttgttatgtacagataaggaaagtttttgattattttttgcactggaccctcataaaaagtgattgcctagatgacactagaaaattctaagaaaagttttcagagtctctacctgcttgagattaataaacatgtctttggaggccaaacaattaactatgcacaggtagagattccttttcttttgggagaatacagtctgtatgggcatgtatttagaagtacttaacagaggaagagctagcttaagttccttaatgagaagcatttggctttaggaaatcctaaggtttgtgaggaacctagaaaatgactttgacattcattggctacagttattttctttgacttttcacatgtatttccctttaaaagaagtcattgttagtctaggagatttgagtactgatagtgcctgtgaagtggaggagggggaatagttggagtcaggagatttcttggagaggtaaaaggatcatgatatgtgtaggctaaaatagaactcctcccaccccccaataaaaaatctgggattggtgttgggagagataatggggtagataatgaggaatttctgccctcggtgtccattggcatactctgtactgtagttacccagagttgtttcctgccaggcactcagtgcttttaatagatggagttgcaatttaccgtaatataatcatgaaattgataaataaagaaaaaacagtgataggaagatttgaaatacagaagaccaggtttaaggattaaccacttacatggtattattttaatattaattgtatattatttttttccatgatggcatcttaaagctttagtgatttttatttttatttttatttttttgagacagagtttcactcttgttgcccaggctagagtgcaatggcgcagtctcggctcactgcaacctctgcctccggggttcaagcaattctcctgcctcagcctcctgagtagttgggattacaggcatgtgcygccaagcctggctaattttgtatttttagtagagatggggtttctccatgttggtcaggctggtctcgaactcccaacctcaggtgatccgcccgtcttgacctcctaaagtgctgggattacaggcattagccaccatgcccagctgatttttttttttaggaaaaatttttccaggagcaccaggcaagtatttaggttttttttgcttgtttgtttgttttgagacggagtctccctctgtcacccaggctggagtgcagtggcgtgatcttggctcactgcgaccttcacctgccgggtttaagcgattcttctgcctcagcctcccaagtagctaggactacaggcgcgtgccaccacgcccagctaattttttttgtatttttagtaaagacggggtttcaacatattggccggcctggtctcaaactcctgacatcgtgatctgccttcctcgacctcccaaagtgccaggattacaggcgtgagccaccatgcctggctgtatttagttgttttaaaaatatgtgctggccaggcgcggtggctcatgcctgtaatcccagcactttgggaggctgaggcggggcagatcgcttgagcccaggggttaagaccagcctgggtaacagggtgaaaccccatctctacaaaaaattaaaaaactagccggcatggtggcacgcgcctatagtcctagctactcaagagggtgaggcaggaggattatcgcttgagcctgggaggcgcaggttgcattgagccgagatctcaccactgcactccagcctgggtgatagagcgagaccctgtctcagaaaaaagaaaaagtgctaattctgtacaggatttaaggtatcaactatatctaagttaaacccacgttattttaactgaacttaaattttaaaagttaaaaatttaagaatccatatattgtgtaagtaattttcatctccctgttttcatattcacctcagtagttgcgtattgtaaccacagtagtatactggtaatagtaaaagaaattctgtcctaaaagaactgaaaattgagttcaagatattaagaattatctgtgtaggtgggattatgggtgatttatatattttttgacatttagtttttctgtaatgagtatgcattacttttgttaggtccattcttagaatcttactgtagtcactgattttataatagaaatatattttgatgccgggtacggtggctcacacctataatcccagcactttgggaggctgaggcaggtggaccacgaggtcagttcaagagcagcctggccaagatggtgaaagcccgtctctactaaaaatacaaaaattagcggggtgtggtggcaggtgcctctagtcccagctatactggggaggctgaggcaggtaattgcttgaacccgggaggcggaggcagaggtgagccaggattgtgccactgcactccagcctgggcaacagagtgagactccatctcaaaaaagaaaaagaaatatattttgaaagaaagctatagtgatgatgtaatagctaggaaaatgtaaggcaatataaaatgatatcttagagatattgataagctggagcagcaaaactacccaagtgctagggcattatttagagtataaaaatgaattcatacccccatttcttttcttttttttttttgagatggagtctcgctctgttgcccaggctgaagtgcagtggcgcgatctcggctcactgcaagctctgccttccgggttcacgccattctcctgcctcagcctcccaagtagctgggactacaggcgcctgcaaccacacgcggctaattttttgtatttttagtagagacagggtttcaccgtgttagccaggacagtctcaatctcctgacctcgggatccrcccgcctcagcctcccaaagtgctgggattacaggcgtgagccaccgcgcccagcctcatatcccccatttcaaacacgctgtaaacaatgctcaattactttcctcttaagttgaaaccaccaattactggggaaaggggcagttagattttattggttgactttgtgtttttactaatccttgttgaaaagtagaggaattggtttagttgagaaaacaaaatactaaaaaatctgccactagactttttaagtcaagagtttgtataaaatgaaacatatctactatctaatctataaaatttagaatctttttaattctaaagttaacttaagtgtgatttttagtgctgttgctgaggccagtgttgcttaaagcaggaacttctacagtaattgacaaaacttgagtttttctgctctcatttatccatccttcagacccctcagatgtcatctatttcctgaaatctgacttctccagttttagtaattcttacaatttttcaggatttagatagtactgtacagtttactgctatgtatatgtctttaatacttgttgttttcagatattacactaatgtctcatctgtagtataaatcagactttctgtcttctaccagttacataatttatataattgttgcagtacatgtttgttgatttactaggctggattcatgttacagaattggtaatcttggttgggcatggtggcacatgcctgtaatcccagtactttgggaggacaaggcagaygaatctcttgagtttaggagttggagacctgccttagcaatatggtgaaaccctgtctttacmaaaaaaaaaaatacaaaaaattaacagggcatggtggcatctgcctagagtcccagctacttgggaggctgaggtgggagggtggtttgagcccgggatttggaggctgcagtaagccacaattgcaccaattacagcatgagaccatgccttaaaaaacggggtgggggtgttaatcttggctagatgtctgttttgattgttaggatgaattgtgttggtagtatttttctaaaatgttctatccaaatcaacttgtttattaatctcaaatagggagagactctgaaaacttgtcttagaattctctagtgtcacctaggcaatcactttttatgagggtcaagtgcaaaattaatcaaaaattttccttatctgtacataacaaggtaatataataacacggaaccacaacatcaatgttttagcaaattacacatacctttttttttttttccggacggagtctcactctgtcacccaggctggagtgcagtggtgccatctcagctcactgcaacctccgcttcccgggtttaagcaattctcctgcctcagcctcctgagtagctgggactacaggcatgcgccaccacgtcctgctaatttttatagttttagtagagatggggtttcaccattttggccaggatggtctcaaactcctgacctcaggtgatccaccctcctcggcctcccaaagtgctgggattacaggcgtgagccaccgtgcctggccccaatttttttttttttttttttggtacggagttttgctcttgtttggagtgcagtggcatgatctcggctcactgcagcctctgcctcccccgggttcaagcgattctcctgcctcagcctcccaagtagctgggattacaggcatgcaccaccacgcctggctaattttgtatttttagtagagatggggtttctccatgttggtccggctggtctcgaacccccgacctcaggtgatccgcctgctttggcctcccaaagtgctgggattacaggtgtgagtcaccgcacccggccttcaattgttttttaaatggaccttccaactcagtagtgccagaaaccatgtgttcaatatttgaaattataatattttgatatacgaattgcatctatcagattgcctgttaaacccaaaaactattttttttttaacagttatttgttccagtttttggtttgaaagtgtttggtttaaaaaatgttattttagccatttttattaaactttatgccaaaaaaattaaggtatgtcagaaagtgttcataattatggaaattttctctttggataggctcgcatgtcttgggatagagagtcgacagaaattcggtaccgtagacttcaacatttgcttgaaaaaagcaatatatactccaaatttttattgacgaaaatggaacagcaacaattagaggtatgtatatgtaactgactacaagtgaaagcttaaaaaaatttaaaaatagctttattgaagtgtatattatatacagtaaaatggacagattttaagtgtacggtttgctgagttttgactagtaaatatatagatctgtgtaaccaccagcacaatcaagatacagtgcacttccatgaactccaaaaaattgtcttgtgctgacagtaatccccatggctggtgtccagcaactactgatttgctttctgtcactatagaccagtattgttttttcctagaaaattgtataaatgaaatcatggtattgtgctagtgagtaaatagttggtcttcatcaccatttcctggtatacaactcttgaaatccttggaatcttcaaartaatagtgtttttttttttktttttttttttttaatgctaatgatcaatggctagctgcccttaggtagcttcaggatgggagcctaagaaagacaaaacctggattagagggttgggatttagcctcaccctcaactttgaggaaaagagactgaaagttaacttgttcaccagtggtcacgattgaatcaatcacgtctatgttatgaggtcttcattaaaaacccaaaagggctgggtgtggctcacatctgtaatcccagcactttggggagcctaggtgggtggattgcttgagcccagaagtttgagaccaggctgggtaatatggcaaaaccctatctctaatagaaaaattagctaggtaaggtggcatgtgcctctagtcccagctacttgggaggctgaggcaggaggttggcttgagccaaggagattgaggctgcagtgaactgtgatggcaccactgcattctagcctgggtgacagagcaagaccctgtctcaaaaataaaacaggctgggcgcagtggctcacgcctgtaatcccagcactttgggaggccaaggcagacagatcacttgagcccaggagttcgacaccagcctgagtaacatagtgaaaacccgtctctaccaaaaatataaaaattagccggtcatggtggtgtgtgcctgtaagcccagctactcagaaggctgaggcaggaggatcgcttgaacccaggaggcggaggttgcagtgagccgagattgcacccctggactccagcctggatgacagagtgagaccctgcctcaaaaataaataaataaaaaaaaccccaaaaggggacagggtttggagaacttctggatagctgaacacatggaggttcctggagaggatggcgcatccagaaaaggcatggaagctctgcgcttctttctccataccttgttctatacatctctttctctggtgttcctctgaatatgttgtaatctttctttctttctttcttttttttggagacagagtcttactctgttgcccaggctggtgtgcagtgcaccatctcagctcactgcaacctctgactcctgggttcaagcagccctcccacctcggcctcccgagtagctgggactacaggagcacaccattatgtctgtcttatttttgtattttttgtagagacagttttgccatgttgccgaggcttgtctggaactcctgggctcaagtgatctgcttaccctggcctcccaaagtgctgggattacaggggtgagccactgcgcctggactgtcatattctttataataaaccaataaactttaatgtttctttgagttctgtaagctcctctagcaaattagtcaaacccaaagaggggcttgtgggaaccctgatttatagctattcagtaagaagcacaggtaaggcgacttgggccttgcgattggcatctggaactggtagttaaaagtcttggggactgaaccctcaayctatggggtatggtgctttcaccccgtagatagtgtcagaattgaattacaatagaggacacccagctggtgtcactgcagaaatgcttgtttggtgtatagggaaaacccccacacattgggtcacagaagtcttttgtgttgattgttgagtgtgtagggagaaactgagtttgtttttttctcaatattcttgcacatatgcactctttgtcttgttacttttgctcagtgtatttttgagattcattcatgtcatgtttttctgtaggttattttttttattcctgagaaggattccattaagaaatgtcgttattggggtgtaattgacatacactaaactgcacatatttaaaatgtacaattccctaagtttgatatatggatatacttgtgaagacataacaatcatgatagtggacatacccactgattccaaaaaattctttctgcttatttataattcttctcgcccgtccctaccccatgttctatccacagatagccaattgatctgttttctgttattataggttcatttgcattttctgttggtgatgggttcttttagctttcatatgtctgaatgtcttcacttaccttcatttttgaaatacgtttttactgggtaaagaattttttttctttagtactttatttcttggagtactttaaagatgtttcactgtctcctagcttatgttgtttctgaaaagtgaaagtcctgataatgtctatatgtctgtaagcaatttgactgcctccctcaatcccattacctttcagacctgtctccagatgtgtttcctgtcttgggcttttgcccttgctattttatgcctggaaccttcttcctctaaataactgcatggcttaacttcatcttcaagccctgacttaaatggtttctagatgagacctgccctcacaattttaagaaagttgctaacacacctgattctctttaccttgttctgttcttcccattgcacttttcatctgatatacatcatttattgtatttattgtttgtctttccactagactgttatgaagatttaaaaacttgtgcaaattgagagaatacagtaagtcccggtgtccccatcacccacatttaaaaattatcaatttaaattttgctgtatttgtcaaatctcctttttcctttgtttgaaacccttttattacttttttatggtaaagtaaaacaaatggaaaaacaaatattcaacttaatgagttacacagcatctacccctttcatcacctcttggaaatggtttgaatttttggtgtctttaaaaaatttgtaagagtatgtctagaatagcttttagtctaggaataagttgatcccttttctgagcactctacttgatgccctttatattaagaggactttctactttggctgagagaatgtgaggtataccttattatgcctgaccccttggaacatgagaggttccacctgcttctttctggtgactcttctcctggccttggttaccatgcacttaccagtactcagcctgagagagagataacagctgcctttgtgcagctttgtcctctctggtacttgaccctgggaatgctactgctcttaagttttggattctgtctcctcaacacaaagagactgttgggctctgtttggatttttctccattatttgtactttaaaattgtatcaggcagtaagctgggcagtcagaagattaaccttgtttccgttttgtcagtgtttacagtccgttactgcatgttgtctgaaaaccattgtttaataaattttatctggattttagttgtttaaggcaggaggctaaatctgtcccattagtccataaaggcttgaagtacaagttcctccctggtttttaattatgatagaccttagtttctcattgtaaacataagttatttgagaattgatatgcgttttttttttaaatgttgcactttccacttgtgacataagaaaaaattgtcttacaggaacagaagaagaaagaaaaattggagagaaaaaaggagtctttaaaagttaaaaaggtaatatagccagccggaatattttttatgtcatttaaatattgaagaaatacttttgtattcttctgacttttttgatcatctgtttaattttaagtttctttagtgataaacctaactttgttacaagcaatgcagaaacatgtaaaatctgttcctcactatttaagaaatggagaaagagccaaagtatggtccactttagtttcttattctatggattattttggacgttggcaaaatttgactttcttaattggaaagaatctgcaaatttaaacttcaaggcattttgtaagtggccaccttctttgaaacctgtaatgaagttttgctagtgaaaagagaaataatttattgaatacatactgtgkgtcaggtgtgctatcatgtcttctcttactctattttttttttmttttttgagacggggactcgctctgtcacccaggctggagtgcagtggcgcaatctcggctcactgcaagctctgcctcccgggttcacgccattctcctgtctcagcctcccgagtagctgggactacaggcgcccgccaccatgcctggctaattttttgtattttcagtagagacagagttttactgtgttagccacgatggtctccatctcctgaccttgtgatctgcccacctcggcctcccaaagtgctcagattacaggcatgagccaccacgcccagcctgttttcccttactctcacaacagttctttttaggtagaggtacttttttcccccattttacataaataggctgatgcaaggagataaagaacaatcatattcaaggattctatatttgtgaattcgcctactcacttacatttatttgtaaccccagagtcaagattcctgacaccgtcatggtcatttttggatatgcttatgttcagagcagcaaagaattttagtcctccaatacatatgttccaagctcagctcaaacatgggttgctgttctttgttttctgctaccatatgtatgtcaagcatatatccttttcatggtctttatttagcaccataacttttgcgtttttttgtgctttttcatggtgattttgctgttaaaatggcccccaactattgtaccaaagtgctgtctagtgtttctaagtacaaaaaggctgtgccatatggagaaagtatgtcttgggtaagcttcattgaggcatgaggtacagtgctgttggccctgagttcgatatttatttatttattttattttattttattttatttttttgagacagagtcttgctctgtcgcccaggctggagtgcagtggtgcaatcttagctcactgctacctccacctcctgggttcaagcaattcttctgcctcagcctcccgagtagctgggactacaggtgcgcgccaccatgcctggctaatttttgtatttttagtagagacagggtttcaccatattgggtgggctggtttcgaattcctgacctcatgatccacccgcctcagcctcccaaagtgctaggattacaggcgagagccactgcacccagctggccctgagttcaatattaatcaacatatatattaaataagatayctttaaaaacagaaacacaaataaaacagggttgtgtatcgtttggttgaaaatgtcataaccagagtcagagacccaagcttgtatttttcctaggggcaataagtcaatagtcatagtgattttatcgaaccacaagtactgcagataatgagagctgactctaatttgctgaaaattacggatttgaacccaggattagtttaagagcttctacttagcttctgtgctaamctgccttttatttatttattttttttttgagacggagtctcgttctgtcacccaggctgggatgcagtggcgtgatttcggctcactgcaacctctgtctcctgggttgaagcaattctctgcctcagcctcccaagtagctgggattacaagcacctgccagcacacccggctaatttttgtatttttagaagagacagggtttcaccatcttggccaggctggtcttgaactcctgatcttgtgatccacttgccttggccacccaaagtgctgagattaagtccagttatttgattcttagactagttaatggtgatgttaaaatgcctgataaagtattttgcagactgttttgcaacaaaacccattatttaaaactggtaatactgctaggtgtggtggctcacgcctataatcccaacactttgggaggctgaggcagatggattccttgaggcaaggagttcgagaccagcctggtcaacatgatgagaccctgtctctgctaaaaatacaaaaaattagctgggcgtggtggtgtgtgcctgtagtcccagctgcttgggaggttgaggcacgagtattacttgaaccacggtaggcagaggttgcagtgggccaagattgcatcaccgcactctagtctgggccacagagggagactctgttcctaaataaataaataaataaatacataaaactggtaatactgagtcactgagagagagagtattaaaaaataaaaatgggccaggcacggtggctcacgcctgcaatcccagcactttgggaggccaaggtgggccgatcatctgaggtcaagagctggagaccaacctggccaacatggtgaaacccagtctctactaaaaatacaaaaattagccaggcatgatggcgggtacctgtaatcccagctactcgggaggctgacacaggagaattgcttgaacctaggaggccgaggttgcagtgagctgagatcatgctactggactccagcctgggtgacagagcaagactctgtctcaaaaaaaaaaacaaaaaaacaaaaaaaaaaccctctgatccttgactcacttgctaatttcagagacttacctagggcttttcagatttttattttcatagagacagagcttcactatgttgcccaggctggtctcgaaccccttggcttaagctatcccccacacccacacccataccttggcctctgaaagtgctgggattacaggcatgagctagcacaactggccttacctaggggttttgaagaacatgtttttatttatatgacaattttactggcttagtcatttattccctgctctttaacctgttaatttaatatatccttcactttattccacctaactttttataccagggttttgatttttttcccctctgcttttttcataagggcgtcaactattttgaaacttaaaaaatttttttagaggtgatgtctcagtagcccaggctagagtccagtagcaccatagtagctcactacagctttgaactcctggggtcaagccatcttcccacctcagcctcctgagtagctgagactacaggtgcacaccaccatgctcagctaattttcgcattttttatagaggtggggatcttgctttgttgcccaagctggtcttgtactcctggcttcaagcaatcctactacctagtcctcctaaagtgctgggattataggtgtgagccactgcacctggccagaaactgtttcttaacatctcatttctcttaccttcctcactaataattttccattagtattctcttttatttctgctttgggttatatttaatgtatgaatttcattcacaatgaatattccttcaataccctacctattgaagggtattccttcaataccctaccctacaaaaatacctatttttgtatttttagtagagacagggtttcaccatgttagccaggatggtcgtgatctcctgacctcatgatctgcccgcctctgcctcccaaagtgctgggattacaggcttgagccaccgcgcccggccaagatgtacatggtatttctaaataaaaatgccaactatgggctgggtgcagtggctcaacgcctgtaatcccagcacttggggaggcctaggcgggcggatcacctgaggtcagaaattcaagactagctggccaacgtggtgaaaccccatctctactaaaaatacaaaaattagccgggcgtggtggcaggtgcctgtaatccccactactctggaggctgaagcaggggaatctcttgaacctggcaggcggaggttgcaatgagccgagattgtaccagtgcacactatcctgggcgacaagagtgaaactccgtctccaaaaaacaaacaaacgaaatgccaactatgtttaattttgaaatttctcttctaaatggaaaaaaatggacagaagtagagcccttgggaaaaagcagagattatgaacaagttatagtagggaaatacagaaaaatattacatgtaggtaagtataatagtgaaaaattgtggatgtggctcaattgcaggaaacatattttttctcaagttaatcagtgccttttaacgtataatactatraaggtccttaataaaatcaatattctgaatccttgttttgtagggtaaaaattcaattgatgcaagtgaagagaagccaggtaaatatccttattctagttttgaagaatatgcgtttatatttctattttaattgctatcaaaaataaaatttttttttatagttatgaggaaaaaaagaggaagagaagatgaatcatacaatatttcagaggtcatgtcaaaagaggtaaaaataaaagggagagggcacctaacatttgatgttgagtaaaatgtaggttttaaaccaccttaaatctgtaaagattgaatattcaatatcacatgaaatatgttttgaatttaatattatatatcatttataggtgaagctgccaaaatgtttgaagctatctaccaacctacagtagacttgagactaatctgaaactaatgtcatctgaccttcatagacttttttttttttttgagatggagctctgtggtccatgctgccttgcagtgtcactatatctgctcactgcaacctccacctcgcgggttcaagcgattctcctgtctcagcctcccaagtagctgggataacaggtgccaaccaccacgcctggccaatttttgtattttcagtagagatggggtttcaccatgttggccaggctggtcttgaactcctgacttaaggtgatccgcccgcctcggtctcctaaaatgccacattacaggcgtgagccattgcgcccatcctcacttaagtggcaaataggcttacacctttaggttgttctggttttcttttctttctttcgtttccttcctttctagcttccttcttttttttcttcttttctttttttgaggcagggtatcactctgtgactcaagctggagtgcagtggcacaatcatggctcactgcagcctcgacctcatgggctcaagtgatcctcctacctcagccccctgagtagctgggactacaggtgtgtgacaccatgcacagctggctaatttttaaattttttgtagcaatgagatgtcatatgttgcctaggctgctcttgaactcctgggttcaaatgatctttttgcttcagcctcccaaactgctgagagtacaagtgtgagccagtgtgcccagctttttgttggttttcttttcttttttttttttttttgatgagacggagatttacccttgctgcccaggctggaatgcaatggtgcgatctaggcttaccgcatcctccgcttcccaggttcaagcaattctcctgcctcagcctcctgagtagctgggattacaggcatgtgccaccacacccggctaattttgtatttttagtggagatggggtttcagtgtgttgcccaggctgatcttgaactcctgacctcaggggatccacccgccttggcctccaaaagtgctgggattacaggcgtgagccactgcacccggcctttgctggttttcttatttgggttattacagataacagtaatagctttgactctacctattatcttgtgcttgttaagtacctagtggacttgtatagcattttgcaaggaactgtggaaacaacaggcatgggcatagagcttaaaattacatatatgttgcggagagttggggggaaagggtagggtagtaaagacactgtctgaccagagcagataagtatttcagggaaaaagatggtaccagctctttgttaaacgagtctgagcctggcctagtcagarattgtcactataatttaactttttgtaacccctaaccttgtcttaagaactttattcttgttttttgttgaagacttttacgaaactgaaatcatatgctcttttctaaaaccagcttctttttttcatttctcactttttacttaaaaatatgaatgaattagagcatcttcagttctgacaaaccagttccttagcatgtttttaatgtgtcacattcttcctttttttttcttggagacagtcttgctctgtccctcaggctggagtgcagtggcgcgatctcggctcactgctacaagctccacctcccatattcaagcgattcttatgtctcagcttctgagaagctgggattacaggtacctatttgtatttttagtagagacagggttttgccatgttggccaggatggtcttgaactactgacctcaggtgatcctcacgcctttatctcccaaagtgctgcgattacaggcatgaggcaccactcctggccacattcttatatttaaaaaaaaaagcacaactctattgtctactgttgttcttttacctgaagttcaaactctagctcttcagaagaaaaatttacataatagttttccttttctctagggatgcaatgatagtttttcactgaaaaataatcgtcagggggccgggagcagtggctcacgcctgtaatcccagcattttgggaggctgaggcgggtggatcccgtgaggccaggagttcgaaacctgtctggccaacatggtgaaaccccgtctctactaaaaatataaaaattagctgggaatggtggcttgcgcctgtagtcctagctactcaggaggctgaggcaggagaatcacgaacctgggaggcagaggttgcagtgagctgagatgatgccactgcactccagcctgggcagcagagcaagactctgtctcaaaaaaaacaaagttagggtccactgaaattcattatggtatctattcaacttgcagtttaaaacacttttaggctgggcgtggtggctcatacctgtaaaccccggcgctttgggaggccaaggtgggaggatcacctgatgtcaagagttcgaggccagcctgaccagcatggagaaaccccatctctactaaaaatacaaaattagctgggcttggtggcacatgcctgtaattccagctacttgggcaggctgaggcaggagaattgcttgaaccccggaggcggaggttgcagtgagctgagatggcaccattgcactccagcctgggcaacaagagtgaaattccatctyaaaaaagaaaaaccacttttaatatgccatactgaagtttagccagtcatacagctgtttatttaatttgttaaatggttgtggaatatyggttttgggcaaactttgtcataggtggatgaaatccattagtaaagaaaggtaaatgctgtcttcaccttagcctgcatacagagagagatataggagtaagtagtcaatgaaattgaatttttttttttttgagacartgtttctattaccctggctcgaatgcagctggcacaatctcagctcactgcagcctcaacctcccagactcaagtgatcctcgtatctcacactccccagtagcagggactacatgcctgtgccaccaggcctggctgatttttgtattttttgtagagatggggttttgtcatgttgtctaggctggcctcgaatttttgggctcctgcctcggcctcccagagtactgggattacaggtctgagccactgtgtccggttgggaattggatgtttatacaccatattagaggggctcttcactctggcatgcagttcctgaaccttttcatctatgaaaaggaaatgatatctgtgttgtgacttgaaggataaaagttaaattatttaaaggtgggattaatagggaaagagtaaagtacaggtaagatagtgggggaggtgttttaggaagaaataatagcattgaacaaatatccagggtcaagagagactggcagtttcaaaaaacttgaagtaaattatatttgcctccaatttgtatataagtgaaaagagtgatgaaggaaggatgaagctgtcgatgtaagcatggtcaggagtttaaggctgccataagtaaagtaggaagctattgaaagattttaagcaaatttccattttggtaaatcacttggctagtttattcagagatctgtgggcatagtagtttttctttctttctttttcttttctttttttttttttaagacagagtttcactgtgtggcccaggctggagtgcagtggygatctcggctcactgcaacctccgtctcccagttcaagcaattctttcacctcagctccctgagtagtccagcgcctgggactacaggcacgtgccaccacgcctggctgtttttgtattttttcatagagaggtggtttcaccatcttggccaggctggtctcaaactcctgacccgaagtgatctgcttgcctctgccttccaaagtgctgggattacaggtgtgagccaccatgcctggycccataccagttattctttcatttactgttacttctttcttctgtatatttactgaatttcctgctctcttttcctcttcgcctaactaaattctttccattgtttcattctcaccttacttgctgaagaatctctaaatctgtgaatgcatttggaggggtataacccaattgagtgttctgccactgtggaccctgctcctccaagttatcccttctgtttcttcaccttttccttcctcactgggtctttgcctttcaattatagatacattgtgttttcctgtctgcagaacaaaaatttttgatccagtctttctagattgccctgttttttattctttatttccaaggttttttttgagacacagttttgctcttgttgcccaggctggagtgcaatggcgccatctcggctcattgcaacctccggctcccaggttcaagcgattctcctgcctcagccttccgagtagctaggattacaggcatgtgccaccacgcctggcaaattttgtatttttagtagagacggggtttctccatgttggtcaggctgrtctcgaactcccgatctcaggtgatccacccaccttggcccccaaagtgctgagattacaggcatgagccactgcaccggcctatttccaagctttttaagagtaggctggactggacatgatgcctgacacctgttatcccagcactttgggaggccagggtgagaggatcacttaagcccaggagtttaagactagtttgggcaacatggcgaaatcctgtctstacaaaaagaaatacagaaatagccaggtgtggtggygcatgactttggtcccagctacacaggaggctgaggtgagaggatcacctgagcctggggaggtgaaggctgcagtgaggtgagattgcgccactgcactgcagcatgggcaagagaatgaaaccctggttttttkttttttttttttttgkagagagagtctcgctctgtcgccaggctggaatgcagtgctgcgatcttgactcactgcaacctccgcctcccgggttcaagtgattctcctgcctcagcatcctgagtagctgggactacaggcacacgtcaccacgcccagctaatttttgtatttttagtagagatggagtttcaccattttggcctggatggtctagatctcttgaccttgtgatccatctgccttggcctcccaaagggctgggattacaggcgtgagccaccgcgcctggcccttttttttttttttttaaagagtagcctgtgcatatttccttacacattatgcagttgagcagttttacgcctaccagttgaatttattggtatctttgaaattgatacctagcacaaagcaaacaatttatcttttcctctcttccgaatcttgctcttttgttttctctttttttggtgttaatatcagaaccagtatctactrtgtcatctaaaacaatttaggaggttatctgaatttccttatatatctagatttttatcgatttctgtgagtcatttcatttgctgctactctggtgtttatgcccttactgtgccctatttatagtagtttcttaattgatttttataatcctagtctagctctcattgtcaagagtaccagattggtttttctgaaactcaaatataattactcataacctccattactttttatggtttcacaaggaattgcattttcttgtagaaaaatttgagaataaacaaaatacaaggaaatcacctgaaaagctgtcacacagataatcactaacattttggtatatgtatgttctttttctttgtattacggaaaatctcaaaaattacaaatgtttagaggatagtaaattgaatgtccacctttatcactttttttttttttgagatagagtttcactcttgttgcccaggctggagtgcagtggcatgatcttggctcacagcaacatccgcctctcaggttcaagcgattctcctgcctcatcctcccgagtagctgggattacaggcatgtgccatcatgctcggctaatttttagttttatcagagatggggtttctccatgttggtcaggctggtcttgaactcctgacctcaggtgacccgcccgcctcggcctcccaaagtgctgggattagaggcataagccaccacgcccagccaatcgctttttaattctgggatattttaacaaaaagctcagcaagactttttttttttcttaaggtggagtctcgcactgtcacctgggctggagtgcagtggcatgatctcggctcactacaacctttgcctcttgggttcaagtgagtctcctgtctcagcctcccaagtagctgggattacaagtgcccaccaccacgcccagctaattttttgtatttttagtagagacagggtttcaccatgttggccaggctggtctcaaactcctgaccttgtgatttgcctgacttggcctcccaaagtgctgggattacaggcttgagccaccatgcccggccaagactattttttagaaccataaccacaatacagttaccacacttttgaaagtcgatgggaattccttaatatttaaatttctcaataggctaatttttatttttagggatgggggcttgctgtattgacgagactggagtgcagtggctattcctgagtattgtcatagtgactacacctcaaacacctgggctcacatgatcctcctgcctcagtgtcccgagtagtagtgcagggactataggcacttaccgctgtgatctgcttagctcatacattttaaaaaaatagttggttcaaatcaggatccaaaaaagttacataaattgtgtttgattaatgcgtatcttgggtctcttttagatctagagtgtctctcatcttttttaagaaacattatttgttgaagaaaatgagtaattctgtataattccccacattctagactttactgattgtatccccatgatttctctgcctcttgtgtttcctgttaactatagtaactataagttaaatacggaagtttgtgattaaggtgtttttttatttttttttttatttttatttttttttgggagacaagatctttctctgttgcccagggtggagtgcagtggtgccatctcggctcattgaacctctgattgctgggctcaagcaatcctcccacctcatcctcctgagtagctgggactacaggcgtgtaccaccaagcccagccaacatttatattttttgtagagatgggatctcaccatgttgcccatgcttgatttttaataagaatacttcattggtggtatttatagattttgatttatttccaaattgttctttcaaaagtttcattttatctagtcattttacaggacagcttttatcagttcctggtataaaatccttttagcctcagccttataatatgaatatctatacatacataatacttcatacacacacgatatacatatattcccatgtatatatatgtgtgtgtgtcagccacttacatgtcctgttactcttctatgaatcttaaatttgatattgctgttttgaatctacttcatcccctatgccttctatattctctctgcttgaaatctaccctcactatcttgaatgatgaagcctggtgacaactttttagataattttatgtaagataattatttgctaagtcatccagtgacatactcgggtattgtttgtctccctaccagcagcatctagtaggtacttcaaaatcagagcactttattctgtatttttaattttttctgtctttgcctcttacccaggaatgcaaactcagatgtctatccacagaggcctaaagtgggctgtaacatggtttggcaaactttttctgtaaatagccagatagtaaatatttttagcttttgagtagttttgtgggcaactactcaaccctgtactctgctgttgttgcttgaaagcagccatagacaaaccgtaaacaagtgaggctgactttgttccaatttatcccatttctttgcttttaaaaaaatacctgtgtattcgcttagctggagttggtctacaggctgtagtttgctgaccccaggactagaggtttgttgccatgtgtgaatttgtacttaatctactcagattaaaagaaagaaaagctggaaaatcactgtatttgatgaaatatcccattgtataagtgttcccaaattagcctagaatgttatgaaatattatgagccagtaatgtctataggcttatttctgcctgaaggctactagttttatcttgagaatctcatcctcatttcctggcaaaatgagcacagaataaatgcttgttgaataaataaataaatgaacttcatacattattaatttgtttttgttttctcaaactactaggaaattttgtctgtggctaaaaaaaataaaaaggagaatgaggtaagaaatttataatgtaagattaagtttagaagtcatatttactcctcagttactagtcctttttctttaatcagcagtatacgttcttctcactattatcctgtttctttgctttaaaaaaaaatacctatgtattcacttcttccatatccaacattcttcttttttatgtatcaactttagttagttgttttattgcatgattcttgatgtataaatgttaatttatgggtctagcaatgttgcttttaacttgtgaatctggcagtgatacaagtgctcgtaaccatgtggatataaaccgtgaatcatcttatggaagctgtgagggatgccttaatcttgcttcagaccttaaagattttttaagtttcttaaaagttctgtttgagaaggcttgatttccgagccacctcttcacttagcccatttcatgtagagaggttccttgttatctgactttttattgttcaagtacttaaaattacaaggttgcctagggaagcaaaataatcatgacatgaaaatattcatgaatggatatgaacttcaggtagttaatttacatattaaagatttttaggcctttgggaaattaatgttatgtttataaaatgagagataatctatttggtcatataattttgtccaaaatttatattgtaaaagtgtcttggtttttattctttgttaagttattaaggactggtttatgggtgcagtttagttggatttttaaagatttagttagataaacatttagttggatttttaagataaagtctagatgtaatcttctgtaatttactatgggattttggcttcattttataacttacagtcagtcagtaagaaatagttgttaagtatggtattttaatgaatttcgacacttgcatacacttgtgtaaccaccatccaaatcaaggtatagaacatttccattgtaaagggatctcttctatgtctttccacccccaaacccagaggaggccactttttacaccttttataggatggcttattatttcctttccactcaacatgtctgtgatactcatttatgttgttgagcatattagtaacyggtttcttcttattgactagtattctgttgaatgaatgttacaattttctcatccatccccttattgatgggcatttgggttgtttgcagtttgtgacttttatgagtaaggttgctatgataatttgcacacaagtccatgtgtagacatgttttcatactttctgcctgtgtacctgggaatggtattgttgtgttacgtggcaaatgtgtgttcataagaaagtacagattttcccccccaaagtaaacacatcattttattctctcgccagcaatgtttgaaaactccagcttacattattgtcagcatttgatagtctttttaatttcagccattttattagatgagaaatggtaacttgtgtggtttttaacttgcattttcctaattactactgaagtagagtatatttttatgttctttgataactatgttttctttctttttttttcttttttgagatggagtgtcactctgtcgcccaggctggagtgcaatggcacgatctcggctcactgtaaactctgcctcccaggttcaagcgattctcctgcctcagcctcccaagtagctgggacaacaggctcatgccaccatgttcagctaatttttgtatttttagtagagacagtgtgtcaccattttggccaggatggttttgatcacttgacctcatgatctgcctgccttggcctcccaaaatgctgggattacaggcgtgagccaccatgcccggcctgtatgttttcttttgtaaagtatctgttaatatcttttgcccgtcttatttatgcgtactgtattttctgtgtaacagtttaataaattattgagtatcacaatattagaagtttggaagagagatacaattctaatgatcttttcaaaagtatgtgcctgattttaatttgtaagggttattctcagatttttatattttattttattttattttattttattttttgagatggagtcttctgtcacccaggctggagtgcagtggctgtgttcatggctcactgcagccttgacttcctgggtttaagtgatcctcagcctcccgagtagctgggatacaggcagttgcgtgcaaccacacccagctaattttttgtatttttagtagacacagggtttcgccatgttgtccagggttgtcttggatacctggactcaggtgatcctcctgcctcagcttcccaaagtgctgtgattgtaggattagccactgtggcagcctgttatttttttttttagtagcttttcatttgtagagggatggcgatgtctccagttttttaatccaggtgtgatcttagtcttctatacttaatgattataggactcagtagattttgttagttgcattttctgataaatggtggcatacagcagcattttgtataacacatcttattaaactttttttctctacaggatgaaaactcctcctctactaatctctgtgtggaagatcttcagaaaaataaagattcgaatagtataattaaagatagattgtctgaaacggttaggcagaatactaaattcttttttgacccagtccggaagtgtaatggtcagccagtaccttttcaacaaccaaagcacttcactggaggagtgatgcgatggtaccaagtagaaggcatggaatggcttagggtaatgaattggaatttttaatacaagatactggttttatttctatagtagcctaatgatttgaggtaccacaacttgagtcatttctatcatgtttcactattatacatttgtatgtggatacttgctttctgatttctttaccctgaatttttagaagtagaaattaccttgttaatggcttccagcacttttatggctttgataaaggactttccagtgttgttataatttatggtgtgaatatatcagctttaacataattctcatctttgggtgtgattttttaaagagaagaaataaaatattgtaatcctgtagttgtttatatccaagtttaaatacagtatctattattttgtccagatgctttgggaaaatggaattaatggcattttagcagatgaaatgggattgggtaagacagttcagtgcattgctactattgcattgatgattcagagaggagtaccaggaccttttcttgtctgtggccctttgtctacacttcctaactggatggctgaattcaaaagatttacaccagatgtaagacatgcttccttatgttaaaattataattttacatgttttcttatgctttgttgtagtaggaattaaattgtagaactcytataattatattggtttctgtataaatattttgtctgatttgacttactcaatctgcacaataccctaatttaaatttatatagtataggttttggaaatccctgacatctttcctaaaatattcctgaatgattttcagtgcattggtaatttgattcgactgagacagacttaggtagagattttattaaaaattctgcttgttcttcacttgatctttgccaaaaggctaagaagagagttttctgttttttctgtacttgttaccttctgcaatttttttttttttttttttttttgaaatggagtctctgttrcccaggctggagggcagtgatgcagtcttggttcactgcaatctctgcctcccatgatgaagcaattcttgtgcctgagccaccggagtagctgggattacaagcatgtgccaccatgcccagctaattttatgtttttagtagagacgatgtcttgccatgttggccaggctggtcttgaactcctggcctgaagagatctgcccactttggcctctcaaagtactgggattatagacgtgagccactgtaccccccgggcccagcccttctgcacatttttgccttatgagaaatatatatattctagacgtagtatcaccatctgtctcattttatatatttatatatatattatttatttatttattttgaaatggagtctgtctctgtcaccatgctggagtgtagtagctgggactacaggcgcacaccacaaggccaggctaattttttgtattttggtagagacaggatttcaccatgttggccaagatggcctctatctcctgaccttgtgatccgcccaccttggcctcccacagtggtgggattacaggtgtgagccactgcgcccagcctatatgtgttttatgtatttgtaggttttttgttggggggggttgtgtttgtgtgtgtgtgtgtgtgtgtgtgtgtgtgtgtgtgtgtgtgtatgacagagtttcactgttgttgcccaggctggagtgcaatggcacgatctcggctcagtgcaacctccgcctcccgggttcaagcgattctcctgtctcagcctcccaggtagctgggattacgggcgtgcgccaccacgcctggctaattttgtatttttagtagtgacggggtttctccatgttggtcaggctggtctggaactcccgacctcaggtggtctgcccgcctcagcttcccaaagtgctggggattacaggtatgagccatcccacctggcccgtctatttgtttttatgcctttttttttgtcttcagacaggatgttgctctgttgctcaggctggagtgcagtggcgtcattctggctcactgtggccttcacctcccaggctcatgtgagcctgctatctcacacgcctgagtagctcatgtgaacctcccatctcactccactgggtgagtagctggcactacgggtgcgtaccaccacaccagctaatttttgtattttttgtagagatgggatttctccatgttgctcaggttgatctcgaactactggactttagagatcggcttgccttggcttcccaaagtgttgagattataggtgtgagccattgtgctgggcctgactttgtttttttgtttgtttttttttcattttctcccataatagttcaatgatttgttagaattgcttggcttattttgctatagaaaaatagaaataaaattttttaaaattatattttttccctcagaatgatttatattttctaaatagtcaatatttacattttgttcttaagtctgataaaaatcaatataaaatttttcagatccctacaatgttatatcatggaacccaggaggaacgtcaaaaattggtaagaaatatttacaaacggaaagggactttgcagattcatcctgtggtaatcacgtcatttgaaatagccatgagagaccgaaatgcgttacaggtacaaatgatcttcattggtttctttgtaatacataaaacatgcttttcttcatttatatcactttctcaccatctgggagcatttgtctaatttttttttgttgtcgaaataatagattatattgtgcatatacctgtagaagctggaaacttttattaacagaatgattgggatgaaggccatcatttgtaacaatataattaaagcttatggcagtttaacctatggcttagaatcatccagaaatagacctaatctcggaatgtattacagatatatttgtgacaggtactttgaatatatggaatttacttatcgtattttaatcaaataagagtatttgaagacaagttatttttagagtatcttattggactatttggtagcattttcgtttctattttcttgatgttctagctacttatttaaataatttccagttagcataacagaattgaaagattgaccttttttctttcatgccttctgttttcatttattggtgttttgaacttcttcctcactgctctacctcattcatttataattcttgactgctttttttttcctttctctggccatgtgagaaccctcttagtgcagtccccttaggtttatcttgcttgcttggaaataggaaagtatttaatggtttcaacataaaatcaaaacacataagtcataaatagaataattatgacttgcataattatgaccagtattgtcaggttttatgtgtctgctggtaaaactttggaatatgatttgcagaaatctcagttcaggagtttagcaaagtttatgaatgtgtacagcattaaaaagtatttaaaccaggccgggcatgaaggcttatgccagtaattccagcacttgggagtctgaggtgggcagatcccttgaggccaggagttccagaccagcctggccaacatgacgaaaccctgtctccactaaaaatacaaaaattaggccggacgcggtggctcacgcctgtaatcccagcactttgggaggccgaggcgggtggatcatgaggtcaggatatcgagaccatcctggctaacaaggtgaaaccccgtctctactaaaaattacaaaaaaattagccgggcgcggtggcgggcgcctgtagtcccagctactcgggaggctgaggcaggagaatggcgtgaacccgggaagcggagcttgcagtgagccgagattgcgccactgcagtccgcagtccggcctgggccgacagagcgagactccgtctcaaaaaaaaaaaaaaaaaaaaaaaaatacaaaaattagctgggtgtgatggtgcacatgtttaatggcacaaggattgcttaaacccaggaggtggaggttgcagtgagctgtgattgcgccactgcactctagcctgtgctacagtgagagtctgtctcaaaaagaaaaaaaaatttaaaccagtagtccccaaccttttggcaccaggaaccggttttgtggaagacaagttttccatggaccatgggtgggggatggtttcagaatgattcaaatgcattataattattgtgcactttatttttattattataaaattgtcatatataatgaaataatagggctggccgtagtggctcacccctgtaatcccagcactttgggaagcttaggcgggcagatcacttgaggtgaggagtttgagaccatcctggccaagatggtggccaacatggtgaaaccacatctctacaaaaatacaaaaattacctgggcatagtggcctagctccttgggaggctgaggcaggataattgcttgaacccgggaggcggatgttgcagtgagccgagatcatgccgcttggttggctgggcaaccaagtgagactgtgtctcaaaataataataattttacaactcaacataacgtagaatcagtggtagccctgagcttgttttccatctagggatgatgggagacagtgacaaatcatccaccattagatttttataaggagcgcacaacccagacaacccagatcccttggatgtgcagttcacaatagtgttcatgctcctatgagaatataatgtctcctgatctgacgggaggcagagctcaggccataatgtgagcagtggggagtggctgtaaatacagatgaagcttcccttttctgtaaatacagacgaggcttccctcgctcacagctgcttacctcctgctgtgtggcctggttcctaacatgccatggacccctacaggtctgtgacctgggggttggggacccctgatttaaagcatttctttacagtaaaagtaatatataccaattttttttaaagggtagtgtacaggaagatgtaaaagcacctgtaattctacctgagaactactacttttttcttttttttttttttttttgaggcagagtcttgctctgttgcccaggctggagttcagtggcgcgatcttagctcactgcaagctccacctcccaggttcacaccattctcctgcctcagcctgccgagtagttgggactacaggtgcccacaaccatgcccggctaatttttttgtatttctagtagagatggggtttctctgtgttagccaggatggtctcgatctcctgccctcgtgatccgcccgcctcagcctcccagagaactactacttttatactaaataattatagctaacatgtaggtataatttacacatatgatcatactatacattcaatttttttttttttggtccgagacagggtctcactttgtcacccaggctggagtcctgtggcacgatctcagctcactgtagcctgaatctcctgggctcaagtgattctcctacctctgtctcctgagtagccgggactacaggcgtccgtcatcacacctgactgattcttgtatttttttgtaggaacagggtgtctcaagccatccaactgtctaggcctcccaaagtgctgggagtacaggtgtgagccaccacttccagcctgcattcacttttgcaacttgtgttttctactcagtagtataacatgaagacccttcctgtaatgaaatagttaagcttccttgtccatttcctttgccagtggctagaaacttttgactttttccatttaagtgagcttatattatcatttcaaggatcttagcttactctggtaacggagtgtgaggttccagggcttttgttgctgagtgcgagtggaagtgactgagttcacttgctaatttggctttcagattcctcatcatttatttccttgttttcttttctctcacatacccattataaaagtatatatatatatatatatatatatatatatatatatatatatatacacacacacacacacacacacatttttttttttttttttttgagacagtctcactctgtcacccaggctggagtgcagtggcacgatctcggcttactgcaacctgtctcccgggctcaagcaattctcctgcctcgcctcctgagtagctgggattacaggcatgtgccactacgtccagctaatttttgtatttttagtagagacggggtttcaccaagttggccaggctggtctcaaactcctgacctcaggtaatgcgtctgcctcggcctcccaaagtgctgggattacaggcctgagccactgcgcccggccaaggatattttatatttttatctggatttttagatagctgtcttacagtgagagataattcaggttttttggtttaacatattgccaggaaaataaatcctttcttggttattttaataaagaagatacagtactataaacttttttcattcttttgggatgtataaagcaaaatgcaaaacgttctctatactctttcctcaatttgtcagtcccattttttaaggatagttatatttttcagattgttatttatatttccagaaatacttcatatttctgtatgttaatataaattagattaattataaattttcctgattaagatatatgagaaatcacagatattaaaatgagaaagttaaaacaatttccttgataactttatgaaagtgagtgggtgactttctgtgaaaatataaattgcttaaataagggaaaattctagtgctatttgatgtttcagcacatatggaactaataaaagctcaatttttagtagtctagtgtaacattaatatcaaaacttgggaaaatattagaaaagaaagctacaactgcgttgactaaggtgtgaatagggaaatcttaaattcaaaataggtggagttcaaactttattgcatattttagtaggtctcttccaggaacagaaatatctatcagttttaggaatccttgtaagtggatcaaatgaaaacatgatcatttcagtagttactgaaattacatttgataaaattcaacatccatccctcataatagaggttttatttttagaattcttgttagaaaaattgtgagatcattgtttaaaaatctttttcctcaattcgttttctagcattgctattggaaatacttaatagtagatgaaggacacaggattaagaatatgaagtgccgtctaatcagggagttaaaacgattcaatgctgataacaaacttcttttgactggtactcccttgcaaaacaatttatcagaactttggtcattgctaaactttttgttgccagatgtatttgatgacttgaaaaggtgggtaagccagttatttaatgatttaacctcaaaaatctgtgctgttagttaaaattactttcttttcagtgactgaattaaaatgccaaatatttggcaagttctttgtggtgtatattgtatgttctactcctgccacaaattatgtgagagcagattaagaaaagattatttaaaacttacttgcattgattaaaggaagactgctgaatgcaactttaagataatatttttataataaggttcttttatgtgttacctttgtaaaacattttaagatggatttttcttactatatcctcattaaacaaccagggacaatagagttgttaaattatttcctatctcacataaaagaaaacctaggtgtaaagttgttacaagataagactagttagttagcaccagagccaaagttaaaaccaaggtctcccaatgtaaacacagtgttttaattctggaaactgtttgaatcttagcttatataataaaatcagacataaaagtagttttcagaaagtaattagtagcttcagaatggaggaggaggtaatgttgacataatttaaaactgattacaacggaaatataacttgggcaaaaaataatttatacttgttttggcatcagtgaaggaagtaagctaattgggtgtggaaaaataattttaaattttgggaatttatttcaaatctggttaccgaakggtggctcaaggcaggctaccttattgtgackctgggcgcttttattgaaagacaagaattccaggtcctgtgcagacatactgagttacagtgtcaaggtaggagttgagaatctgagttttttgaacatgcttctggtgatccaagtttgggaacttctagtctactgcataaatgttactagcattttccagaattgggtataatgttacctattctatattattaatctgcatgctcatacttaattgctcattgtaatatatatattttcaacattgggaaggaataagcatgtatattattgtcaagttatgtatatgttgaattttaaaatatttattgtagtgggccatacttagactgatggagaaaaatcatatggctttggttttcagagatagttctcacttttgtaatgtaaaattataaatatataccttaatcttatttttgatttttatactactgtacaattgttaatctatttataaatcagaaaagtgttccctttaagctcacagttcttgatggttcaaaaatgcaaccaatttatctttgttgttggaatgtgttctcttccattataaattttaaaaattgcacctaaggatttgatgcaacaataccacgtttcattatcagattattactgtaaatgataaatcatgtatcatgttgacataattgaatttatgtgatggttaacttaaacatttttctcttccagctttgagtcttggtttgacatcactagtctttctgaaactgctgaagatattattgctaaagaaagagaacagaatgtattgcatatgctgcaccaggttttccatgttttcttattctgcttaaccataggctcgatagagtataaaaggaactctggagatcacctgtctaaccctttgtagtagagatttgaaaaatgaagatcctcctacatttaaatgactcctttgtcctttcttctcccagaggtcacatggttttatgacagaactcaagtgcttacctaagttttgtccttttcagatagtatactcattttacccctaatggttactgataagtttgtcaagcacaaaacagaagtatgtggtttttatggaatgcttgccaataatacttttataatttacatccttgcatggctgctgtctaatctatttttattgcttcctgtaattcctaccccatcctacctatctttaatttagagaaacattatctttcaarggtaatctagtcatatgggcctgaaaagcttctcagttgtggtttagcaattttattcaaagtctttatcgttttttctgatattaaagtttatacatgttcatgagaaaaacgtgaagcaggagagaagtgaaaagtaaaaatatcacttcctcttaaaattgtatttcctagcagtgcatgtggaatgattatgttgtgttatatgacaatccaaactcttttctgtctttgtgtaaacacgtgtgttttatctatattttatgaagaaaaggactttaaaaataaaattgttccttaagatagtcttttaaacagttatcagaaaattattttccttttactacatgtagatttaaatcagtttttaatagctgcttattatcccattgtcytgttctactataattaataatatctatctcttcctcttttcaaaattttcaacaatataaacaaggttgtagtatctgtatttaaaactacacctttgcccatttctggctatttccttaggaaagaattcctagaatgtatgtgtcagagtttacagatgagggcttctttgaaggcaaattgccctccagaaaagatttatatgatatacgtccatatgaaaatacttatttactcaagcttcataccaattttgaggttagaagtccttttcagtgttgcagagattaaaaaggatgattattgctgaattgagatgtttattgactattggtagttccttgtggccatattccaacatgtgttggaatatttatttattaatggtttataataactatatgttaaaaataagttaatgttgcaaataatttctttcccctcactttttgggataaactttgtttatggtatctttgtgtgtgttcatgtgcacaagcgtgtgtgtttatatttaaaattttctttttttcccactgtgactctgggcaatgacagaaatttcaatgcaccaatagttatagaagcttttaaatgtcccagtctgaattattggagtaaatgacttatttaggaagagatgtgtttggatatcacatcctcatcagtagtgtatacatccatatagtgtagcaaaggattaagtttctgttcttaggaaatttaattagagtcaagacaatgaatatttatagaatttgtcacttacacgttacctcacagtgtatacaggtagatagatattccttagaaatgatcatctgccttttgatwgaacatttgtagtaattgtcatagttgataattccataagagggctcactggaattgttttactatagataacttcagatttccattaatattaagatatgataatgaacttttattatatccaaattcaacagttttatcaaaaataggggcagttttgaatgttctagcaataagaatattctctgtaatactgtgcttaaatttgagtttatattacttttacgctttgtcctaattatgttttaatgcattactacaggaaaaagttttcattcaaaatgaattcagattaggtggagatagttttaaatcgctagtatattttcttaactattttctatatgaaagaattcctttcctttttttatgcaatgtttacataaacattgcatagtaaaaaaaattttttttactttccgtttaaagttctctaagcttgctacttttctatttccaccccatattgaaggccaaaagcagtataacctttacaaattaattatttaaaattttttattttaaaattatgcgtacacggtaagatatttttaaatgttataaacatttagaaattaaaaagtaagaagtaaaaatttctgttttccttctgcacttcctttcttatctccaaagtataactaatagtttttttgttttgttttttttttttgtttgtttttgtttttttttttgtttttttggttttttttttttgagacagagtctcactctgttgcccaggcctggagtgcagtgagcgtctgcctcccaggttcaagcgattttcctgccttagcctcctgagcagctgggattacaggcgtgtgccaccacacctggctaatttttttgtatttttagtggagaygaggtttcaccatgttggccaggctggtcttaaactcctgacctcaagtgatctgcccgccttggcctcccaaagtgctgggattacaggtgtgagccactgcacctggccaacagatttttttttttttttttagagacaatgtcctactatgacatccaggcaggagagtagtggtgccatcgttggttattgggttgttatctgcagcctccaactcatactcctgggttcaagtgatcctcctgcctcagccttctgagttgctggaaccaaaggtgcatgccaccaggtccagctaatttttggtagatgggtcttgtataagtcttgtttttgtctgctttgaaagcttgtatactaggaaaaacatatataaataccttttttatacatgtgtttcagcggtatagtgtgcctcttcttccacatatttgccatttcagttaacatcaaactatagcatttgtcagtgcatgtggtagaaaaatatctggttatttcatgttttccttacagacatggacatgttttttttaattttatttatttatttttatttttttgagacagaatcttgctctattgcccaggctggagtgccgtggtgcaatctcggctcactgcaagctgcrcctcccgggttcacgctattctcctgcctcagcctcccgagtagctgggactacaggcgcctgccactacgcctggctaattttttctattttttagtagagacggagtttcactgtgttagccgggatggtctcgatctcctgacctcgtgatccgcctgccttggcctcccaaagtgctgggattacaggcgtgagccaccgcgcccggccggacatgttttaacatgtttatgaaacatttacatatttttcctgattgcctgtcggcatatttgtttttgggttggtagataccaacactggtaatgtgtttactatctttggtaatagtctgtctatgattagctctatacctgttgggtatttaagtccagagtcctgaaaatgagctttattatatatgattactatatgtaaaccattgtcagtatttaatggcaggggtataaagagtatacaattatttgtttattattattagtagtagtagtagtattttttttgagtcaacgtctctgtcgcccaggctagggtgcagtggcaagatcttggctcactgcaacctctgtctcccaagttcaagccattctcctgcctcagccttccgagtagctgggattctgtaatcccgccaccacgcctgactaaatttttttgtttttttagtagagacgggatttcaccatgttggccaggctagtctcaaacttctgacctcaggtgatctgctcgcctcggcttcccaaactgctgggattacaggtgtgagctactgcgtccgacctagagtatacaatgattttaatctagtatttgtgctcttttagtgacccgaatattttaatgcataattattgtctgttgcttctgtgttctctttataaatgtgataatcatttgtaaccaccccagctaatgaaagagaataattttaagcctgaaactttagaacttatagaaggaaacttgtatgtctgcatccctaggtcagctggctttttactgagtcttaaaacctcattctattaaaaaatttttaatttttaaaaaaacttttagttttttgggtacatagtagatgtatatatttatgaggtatatgttttgatattgatacagaaatgcaatgcataataatcatatcatggagaatggggtatccatcccttcaagcatttgttaccctttgtgttacaaatgatccagttatacacttttgtgtgtgtgtgtgtgtggagacagagtcttgctctgtcacccaggctggagtgcagtggcacaatcctggttcactgcaacctctgccttccaggttcaaacaattctcctgcctcagcctcttgagtagctgggattacaggtacccgccagcacacccagctaatttttgtatttttagtggagatggggtttcaccatgttcaccaggctggtctcaaactcttgacccaggtgattcacccgtcttggcctcccaaagtgctgtgattacaagtgtgagccaccgcacctggcctctagttatactcttctttatattttaaaatgtaaaagttaaattattattgactgtagtcaccctgttgtgctaccaaatattaggtcttattatttctactttttgtactcattatttcaaatatttttaatttttattcatttttattatttccccttttgtatggtgctgataacatctcattctaaaagttgtgggctataactgaaacttcaaccctaagaaatacaaatgctacctttatatttttacttttaaaattatttgagatagattcttacagtttttaaaagaaaataaattctgaaatgctgcggacaactgtgagtttatcatttggtctggtctgggaaaatctcaagatattttcaccttttgagatttggcattatttatatakgaagtcaaaagataaggtaaaggagtatatggggacagtattccttgaaaaacaagaatgtttaatactcatatttttctgttcatgttttaattttagattttaacacctttcttattgagaagactgaagtctgatgttgctcttgaagttcctcctaaacgagaagtagtcgtttatgctccactttcaaagaagcaggagatcttttatacagccattgtgaaccgtacaattgcaaacatgtttggatccagtgaggtatagtggttttgaaatgtactgtaaatgaaacttgacatataaaatttctcttttttccctttttttttgagagaaggtgtcgctctgtcacccaggctgtggtrcagtggcacaatcactgctcactgcagcctttacctgcctggctaaattttttgtatttttttgtagagactggcatttygccatgtttcccaggttggtctcagactcctgggcttaagcagtccacccaccttggcctcccaaagtgctgggattccaggttttagcaattgtgcctggcctaaattccagttttaaggtccccttgttcatttttaggacttgggtgaatttctaactggggtataaggcataaggcttagtggcaaaagttgtttcctagtatctggagtcctgctaaaatgttaagtgataatctttgtattaattgctttacagtcatctggaatacttactaaaaatttaggccaggcrcggtggctcatgcctgttatcccagcactttgagaggccgaggcgggtggatcacctgaggtcgggaatttgagaccagtctgaccaacatggagaaaaccctgtctctactaaaaacacaaaattagctaggcgtggtggcgcatgcctgtaatcctagctactcaggaaggctgaggcaggagaatcacttgaacccgggagacggaggttgtggtgagccaagattgtgcctttgcactccagcctgggcaacaagagcgaaactccgtctcaaaaaaaataaataaaaaaaaaatgtatatttccgtacagattaactctaatcatgctttctggagatgaacttggaaatgcatttttaacaagcacacaggtaggtatttgagaatccctgtactaaggacttggcaactagactaatctccagatatacagattgagcatccaaaatctgagttgctccaaaatttgaaactttgagtgctgatatgaaactgaaaggaaatgcttattggagcatttgtattttcccgttagggatgttctacctgtacagtttccttacagaaggttattgataaccaaaaagattaataatcaatttgatgatgattattcatcacccaccatattataggagatagaggtgggatgttattatcatgtaactgaaggagacccttaagttttgtttaactttccaggttttttattgtacactataaacctacgtattttcttttcaaaatatttattgtgatgcatttttaaacaataggaccaccagactcttctccccccgacttttttttttttttttttttgagacagagtctcgctgtgttgcccaggctggagtgtagtggcatgatcttggcttactgcaagctccgcctcccgggttcatgccattctcctgcctcagcctcccgagtagctgggactacagtcgcccgccaccacgcttggctaattttttctatttttgagtagagacggggtttcaccatggtagccaggatggtctcgatcttctgaccttgtgatctgccygcctcggcctccgaaagtgctgggtttacaggcgtgagccaccgtacccggcctcttctccctttttaataattaattataattaaaggaagggtctagccgtttacaaatttacattatttgtctgttaatgagcaatttcataatgagcagtttcatgcagtgttacaccagtctgaagaaatatcctctgtactgcaaatttccggagccatatttcaactttaaggtattaaatccttttgtgtaagttcaaagtagttttatacacccttcatttttacctattgagatatgaaggcccttcctcttactttcagatattgttgtccatgttaaaattaaactaatttcccacaacatttgtatttgtctatagattgtcattttgtacataaaatatgccttattttgtttacatttagaacctaaggacatagctttataaactgaatttcttttaattcgttcccttttagaaagaaacaattgagttaagtcctactggtcgaccaaaacgacgaactagaaaatcaataaattacagcaaaatagatgatttccctaatgaattggaaaaactgatcagtcaaatacagccagaggtggaccgagaaaggtttgaattcaaaagtgaatttaagtattctttaaactgtgaccattttttgcatttcccatatatgcattatttgttttggtagagctgttgtggaagtgaatatccctgtagaatctgaagttaatctgaagctgcagaatataatgatgctacttcgtaaatgttgtaatcatccatatttgattgaatatcctatagaccctgttacacaagaatttaaggtgaatactgtttaattctaatttactgttttgattyccattacttttatattggtggaaagtgttactttttttkattataattattaaaaataagtatggtgctatttgtcatgaagattgtaatccttcagtaagctgagacagtcttctttccgaaatttcagagaaccttatcagggttagaaaaatggtcactttctatgagcaactagttttttaaatttttttattttttatagagacagggtcttgctatgtttctcaggctggtctcaaacttcctggtttctcaggcaatcctgcctcagcttcccagagtgctaggattacaggcaagagccaccacgcttggcctctatgcaacttatatttttatttacatattttatgtgaacaactaagaattctaaatttagtaattgatttgtactctgcatgtttacttgttatattttagagagagtggtcatcttttcactatttcttttatcattaatatttggcttatcaaaatcagcctggttgctcattgcttaaagatcaacaggtagccatagaataaaaccagttttgatttggaggttttcaaattaagtaaatgaagttgctttcttgggtagttgatagaatgatagcataatatcaatagaaataaattcttagtaaccctcaatcacagttgtttcaaggtagtttacaataggcttttcyactcctggcaatattgacattttgggccagataattctttcttaggaggtaatgttctgtgcacttaggacatttagcagcatccctgtcttctacccattagatgccactagtattcacttccctcagttatgacaactaaaaagtttgctgccgctgccaaatataccctggggataggtggagggcaaaattgtccccatttgagaggcactgctttacatctttattagagtaagaaggaagacaaaactttcccactcaaatgaaagtagctctctcatgagggaatttcaccagaaggtgaaaaagtctttgtccacaatatttagattacttatcagctcctgtattttctcttaatttctggtaagaattctagcagtagtttacatatacatttagttggaaataactcacttataaagaataagcctgagtatgtacccattaagtttgacataattgttttctttcacaatgactttgagagaggagtgttgaggttagatcaaagttatatttgtactttgtttttgtgaaattgctggttttacattctagagtatgtctttgagtaataactatcttctgattttacaaagattgaataacaggtcagtttttaagttttttaagtgacttggctttgaaaattgaactttccaaatggcttttgttttaacaaagcaaataacagttttctctctattttttcttcctttgcccctccttaagatcgatgaagaattggtaacaaattctgggaagttcttgattttggatcgaatgctgccagaactaaaaaaaagaggtcacaaggtggtacttttgattggaattttggattgttcaattatttttttatcaatcattagaaatattaagatatgtttaatttcaggtgctgcttttttcacaaatgacaagcatgttggacattttgatggattactgccatctcagagatttcaacttcagcaggcttgatgggtccatgtcttactcagagagagaaaaaaacgtaagactacttatgtcatacataccaaactattcttttataattcctatcttgatttctgaagtaatattccaaatagacccacaaattgataaaaagatagaaatgaccagaaaccctgtggttttatcaaaaacaaacattttgatttagtactaagaagtcttaatttttgattcacaaatatatatatcttctggcacaatcttattaataatatcctacttaaccatcactgtaagaatattgggatagcaggaaattttttgcctttttgccctgtcctcaactttctattatgaaaatatcaactatatggcaaagttgaaaaaaaaaaagcaactgtaaatccgcctacaatctgctgttaacatttgactatacctttttaaaaacacatttcctgtaatagcagccttgctgtatccattcagcatttaatcctggttttttggtgcatttaaaaataaaatatagatgatactacccttttccgtaatgacttcagcatattttatcttttggggtaaaatttacacatactgaagcaaataatgtatacatttgctgaatctttctgacaaatgcatatgtaaatttatacctaacccctattaagatatagaatgttaccatcagcccagaaagtttcctgtgcccccttctagtcaattctcccctgcacccaccccatgtgtttagacaactacaattttttcatcattttttgatattagcttttcttatttaaacattgttgtgatacatggtttttaacaaaattaagatctctttaatataggtgcttggacgataaagctaacagcacaggttttgttaacataattgttttatagatctgaatgatttgtttggcctcctttgtttaagtctttaatagttgtaattgaaaacatttttctccttcartcttgttggttaatttattttaatctgttgtatttacatcctttttgcttttagatgcacagcttcaacacggatccagaggtgtttatcttcttagtgagtacacgagctggtggcctgggcattaatctgactgcagcagatacagttatcatttatgatagtgattgggtaagttggaagtatagcaaggaatatgctgattatatttccattttgaatttttttttttttttgaaatggagtctcactctgttgcccaggctggagtgcagtggcacgatctcggctcactgcaaccttcacctcctgggttcaagtgattctcttgcctcagccccctgagtagctgtgactataggtgtacaccacaatgcctggctaatttttgtgtttttagtagagacggggttttgccatgttggccaggctctcttgaatcctgacctcaggtgatccgcccacctcggcctcccaaagtgctggcattacaggcttgagccaccacacccagcctccattctgaatttttttttttttttttttttgagaaggagtyttgctcttgttgcccaggctgggattaagtgctgggattaccagcatgagccaccgcgcccggccattctgaatttttaatttttaatggtacatgttacaaatttacttatctattttgaaaagatacccattttcagctaagagttatttcttcataaagttttttgcaagtaaaaattgaaaatttttttttacttttgtttttagtgacagggtctcactatcacccaggcttgagtgcagtggcaccatcacggctcagtagccttgaccttttggattcaagtgatcctcccacctcattctctcaagtagctgggtctatgggtgtgctaccatgcccacaaaaaatgtaaaaattagtgagaccacgtctcactgtttgcccacgctggtcttgtatcctcatatgatcctcctgccttggcttcccaaaatgctgagattataggagtgagtcatcgtgcccatcctgaaatgttttctttagggtatttaaacttttttgttaatattgtcaaggatctgtggaatgataattttgtctatgaagccactctggaagtttaaattaagacaccactatttaaaagttcctggctagatcattcatgttgactttatccacatgagtttatgttaattttaacctaataccgttaaatattatttttctttttaactttaagaacccccagtcggatcttcaggcccaggatagatgtcatagaattggtcagacaaagccagttgttgtttatcgccttgttacagcaaatactatcgatcagaaaattgtggaaagagcagctgctaaaaggaaactggaaaagttgatcatccataaaagtaaataacacttatgtagtgctttattgtttaaattgtgcattgtgtgttgtggattttgtttttattttgtttataaaatattacagcctgggccgagttctgtgtctcacacctgtaatcctagtactttgggatgccaaggtgagtggatcacgaggtcaggagttcgagaccaggctggccaagatggtgaaaccgcgtctctactaacaatacaaaaattagctgggctcggtggcgggcgcctgtaatcccagctactcaggaagctgaggcaggagaatcgcttgaacccgggaggaggaggttgcagtgagccgagatcgtgccactgcactctagcctgggtaacagaacaagactctgtctcaaaaaaaaaaatattaacagcctgatatgacaggatttaaataagcagtggggaatttgggagcctaaactaagttggtcaycatagacataaaagaaagaatgttagcgagtatgtagatatgtagatgaagagcagatgggcagagaaaaggggtcaaggataactacatgttcctgataagagattggcttgctaaaagttttaagataaatattttgcaagttccatgtattaaaatattaagtgtatttaagtgttataaaaaatctatttatttattgaacccactgtttcacagaatatttcactgcagaatgccctttttatagttttggacacttttttttcctttttcatttccttatcataaccagatgggtctcaacaatgctttttaatctagaaaaaattctgaggaggtggggaactgacataggtgaaaaagttttgttcctgagattccttagagaagttatacttctatccattcaccataaaattttctttgaataaatggcttgatagctacctgaagaaatgttgaaaatcatttatgtaaatcatcaagccctagagaaatgggaacatgataatgttaatgtgaaaagtaatgttggaaatcactaataatttattttatactccttttccacttgtaaatactttctctgggttttgaggtaagagtgtattaaggtttagacaaaattaatttggtgaaacatttagattgtaattggaacttgcattggggaaaaagcataatttttttttaagagaccatttaacttttttacccaggttgttctcgaacacctggactcwagtgatcctcctgccttagcctcttcaagtgttgggcttataggtgtgagccactgtgctcagccctattttcgattttttagtagattaattttgtagaaaattttgaagggatttttttaaatgctgacatttttcagttgagttattacatacatacagcaaaatgcacagatcttaaatgtacaggttaatgaagtttgaccagatttatgtactcctatgtaactatcatcgagatcaaggtagcattttcatcatccaagaaattttctttgttcaccctttccagtaattcctatgctccccttaccatcactaggaagcatccagtattctgatttttgtcacactgatgagtcttttttytgtttagctattttgttgaatatattttttcaacacagagtcatctgtgttgtttttagtagaatttttttcttttaattggtgaatagtttgttttttccattctcctgttggtcgacatttaaattatttctagattctggttattatgaataagttggtcctgtacaagtctttgtggacataatgcattttttggtccttgatcttagggagggtgcgtgtttaactactggaaactaccagccttttccaaagtggacatatcattttccagtcctaccagcgaagcctgagagcttcatttgcttttattttttatcaacacttttttttgccgtccttcttaatgcaagccattgtgattggtttgtaatatgttgtattgtwgttttaaaaggaattttaatgtttttaatttctcattttttttagatcatttcaaaggtggtcagtctggattaaatctgtctaagaatttcttagatcctaaggaattaatggaattattaaaatctagagattatgaaaggtgagtttttaattttagaaagatttaatttgtagctttgaattattcacatagacttgaatattttgttttctatagggaaataaaaggatcaagagagaaggtcattagtgataaagatctagagttgttgttagatcgaagtgatcttattggtaagtattatgcttttttttaatggaagcttcgaaacatacacttaattagcataatgtaatgaaccccttgtgcaattcattcagccacatgtatccaatcttgttttattgtcatttttcttcttagagtattaaaatcaaatctcagacrtgacattttgcccataaatgtcattatctttaacttcttccataattcagatattttctgtaaactggtaaataacacttgtaaatgaatatattcaagttcctgtcttagttaagaataccagtgctttgttctcatatttttcgtcataccaggaggcacatcgtatctggatttcttatttccagtgagctaagattaatcaagataatgttataaagtgtcttgtcagccttcatcctttacttaacacgatgatttattttattttattttatttttttggagacagagtcttgccctgtcgcccaggctggagtgcgctgacacgatctcagctcactgcaacctcagcctcctgggttcaagggattctcctgcctcagcctccctagtagctagtattacagtcgcctgccaccacacctggctaatttttgtatctttagtagagacagggtttcgccatgttggccaggctggtcttgaactcctgatytcaggtgttgtgcccaccccagcctcccaaagcactgggattacaggcatgagccactgcaccaagcctaacgtggtgatttttagtatcccttgaaagtggctgataagaaccattattaacttaatcattgcaaaatggtgatttttcttgttctgtcattcttttattagctgggttatttaagaactttcccttacagtttccctgagatagaagagagccaggatatattgcttcttttttttttttttatcagtttttagaataccaccttatgatctgatgcctacagtgatgaccatgaattattttgaaaacaaaaataatattttgtacttcataatttcctaattattttacaacatattactgtcgtctaggctattgattatttgtctgttgcatctgtatggtggagatactgtataatctttttttcccaactgtattccgtgacattttggtcttttgaaattggtgatggcagtaacattcatatcacggatacaggcagaaactagaaaccccagtctttgtttttaacaaaaaagggtcttgctttgtattcctggctagaatgcaggagtgcgactatagctcattgcagcctaaaagtcctgggctcaagggatcctccagcctcagcctttggagtaagctgggattataggcatgagccattgtgcctcagtttttgttttttttgagacccaattgttaaacatttacctgcgtggcactggctacagtgtcatgatatcttattttcaaatatgttgttcattttaaaattcaattctgtgtcttattgaatcaaaataaaatatattggttggaagtttttttttttttttttttaatcagatgtattttccaaacattttcttctactctggcctgtctcttcacttacttacttagtatcttctgaagagcaaaagttttaaattttaatgaatttcaattttaacaaatttttttctgttcactcatgatttttrtgtcatctgtaactactctttgcctaattcaaggtgttgatattttcttttaatagttttatagtttttgctcttacatttagatctatgatctattttcaatgaattttcatctttttgcatgtcaatattaatttgttaaaaagatgatcctttttctattggatggccttgtcatccttgatgcaaataatttgatcataaatataaggatttatttctgtattctcaattctgtcccattgatctctgtggtattcctatgccagtatcgcactgatttaattaaggtagctttatgggaagtgtactttctctagttttgttctttttcaaaattgttttagatattctggattatttgcatgtttatttgagttttaactttgaaatagtttagggagaaatatgagacatacagcatcatggtcaaatctaaactatattaaaaaacaacattatgtgaggcatgtaaggactgtttaacatctgataatataattcatatcaattaaataatggagaactagatgatcacctaattagataccaaaaaccaacttgccataatatcgtaatcatcttcataatttttttttatttgagacaaagtctcgttctgtcaccgaggctggagttcagtggtgtgatcatggctcactgcagctttaacctgctgggctcaatcaatccccacacctcagcctcccaagttgctgggactgcaggtgtgattactatgtcctgctaattttgttttgtgtattttgtagagacaggggtttgccatgttgctcaagctggtctcacactcctgggctcaagtgatctgtctgsctcatcctcctaaagtgctggcattatcgaaactgcttttatttgcaagtggtctggtttgattatcttcataggaagtccaagggaatccagaatcttttaaaatagaatttaagaagattgcttattaataatatgtgtaacagcaataattgtttaataatgaaggtttttacaacagctacaaaattaacatgcctacaattaaagtttaacaatttttaacatgtttatataaggacagaattatgaaacattgaaggacgttaatagaaagactgagtaaacatgcagatttagctgtatttgtggatatgaatggttactacaaagtgtaagtcagtggtccccaaaactaacttatattcttgaatttttcttctaattaaaatcccagaatgatggctgggtgtggtggctcatgcctataatcctrtcactttgggaggctgaggcaggtggattgcctgagctcaggagttagagaccagcctgggcaacacggtgaaaccctgtctctactaaaatagaaaaaattagcggggcatggaggcatgtgcctataatcccagctactcagaaggctgaggcaggagaattgctagaacctggcaggtggaggttgcagtgaatggagattgtgccactgcactccagcctgggtgacagagcgagactctgtctcttaaaaaaaaaaaaaaaaatcccagaatgactttttgtaaaacagactgttgttaaaatttatatgagagagtaataaagggccagaaccaagacagttttgaagcacaagatattctataccaggtataaagtcttattaaaaatttaaaagtcataataatcaagatggtagaattagcacatggtgtgatatattggctagaagtacaatatggtgaatctagaaagacaactttcacgaaaagctaataaatgtgaaatggaacttcaaacaactgataggaaattcctattaatcaatagatgatctggggaaatagtaattaataggggaaaaattaacttagattctcctctcctcacactgcacttacaaacttcagataaattaacaatccacgtgttcaaaacctaaatattaaaggtagaattttaacctaaaaagacaagaaaatatatttatgattttagaattagaattctttataatacagaaatcacaaattatatgataggtttcatagattttaattacattaataggaaagactactataagacagatgacaccataaagagataagagacaaaccacaaataatatttgcaacatataacaggaagtgtttaggatatgcaagtaaataaaagttgataatgaaaacggataatataagagcaggctattaccaagagagaaagaaatgtctratgaacagacaaggatgattagaaatcagtaatacaaatgaaaatcagatttcatttcacagctgtcatgttgataaaaatttaggagactacatattgtcattgattcaaaatgtttctcaaggtaagctttttgtggtgtgttttcagctattaaacgaatcgtgattgggcctctttttaaaacgtttctgacaacatgattcaaattgatattatttattgctctttgacttgtttatcttaccttaaattcagcaaaagcgattttgactagcaaactgatgctttagattgtatgctcccaagagtctgattctagttgttgtattaagaatagtgtacctttttgctttcactgctattaaatcttggtgattaaggaagagagtgccctgtattactgtgagttttataattttggacagatgactcacttctcataacatcatattggatgtttcttttacgatttcttcttcttatacttctaaaatgtacctgttttaatgtttttcccttagatcaaatgaatgcttcaggaccaattaaagagaagatggggatattcaagatattagaaaattctgaagattccagtcctgaatgtttgttttaaagtggagctcaagaatagcttttaaaagttcttatttacatctagtgatttccctgtattgggtttgaaatactgattgtccacttcmccttttttattatatcagttgacatgtaactagtaccatgcgtacttaaatagatggtaattttctgagccttaccaagaacaaagaagtatccatattaagtttagattttcagttaatttttgagactgagtagtattcttggatacaggctgatgtgtacttaaccacttccagatttatacagtcttcctgtggaagtttagtaaatgtctttttccctcctttcttctagtaatgcagttcatgggctttaggtacttcagttatgaagtaggcttttcatggggagagattgggattatgctytctgttgtttaagaaactgtttgattttagagtctatttctatgagatagtttaccaaataaatgttccttataagatgatctcattaaattatttcttcaggaatagcttaggtgcaataatagcaaaagacttggctgtcggtaggatttggttattttgttttcttggtttcattcactagtactataggagtgtgtcatatagagatttcaagtggacattgtgttagcacaagagaagtttctgaatgaaactttagggtcttgagaaacgactagaaattggaaatggtagtgtatcatgcaaaacaagacagaccctgaaaatttatagtagtgggttaactagaaccaaatataagagaataggccttaggaatatgtaagtaatgcacaatctgtaatagaamagcataaaggccaaaagrggcacaatttagaccctgtgtgaaaggatatcagacaatgaggaagagaaatcctgaatgtaccctggagaggggacatactccataagccatacatttctgtgttagtgtttatttcatggaaaaatattgctgttgccatgtatattcaaatgcagatcagatgatctgttaaggataatggaaccgtcacttaagaaaaacttaattttttttccctgtgtcctattggcacaggtcttttcttttaaatttttattttaatcgttttgaggtacaggtgggttttggttacatggataagttctttggtggtgaagaaaaacttcagatagaacatttggttaaataaaagactatagagcaggtttatttgttttttaagtcaaaatgttaacccattacataagcatgctgacctaggcttgcttgaaactcgtgatcttgtccttagtgacccagtctttcctgttacattgtcctaaatgactggtttcatagttttactctgtcattgcacgtctcatatctcctccctctcactttgctccctattgccctgagaaaatagacgcagtcagaaaagaatctttaaaagttgtcaccgttgcatctgtaaacctagcatctgtgcccatctgtccccatctgccctttattatatactgcggatatattgtttgtcgtagcttgagccaattgcaatgtctcatttcttttataacaaagctccttgaaaaagagttctattatagcaaaactccttgcctgtattcattgtttttagtttgttctgttttttctgaacccattccaatcagatattcatttccattggagctggtatttttaaggtctcgtgacgtcagtgacctcattttacttgatctattagcagcatttcatacagttgttgactcttctccattaaaacatttactttatttggcttctaggaaacatattttcctgctttttcttcctatttctctgactcttttctcagtttcctttgctgtttccttttctatcctctaaacattgaaatatcctaagcctagtttgggattcccttgatggtcttcatttctttaatgggaactgtgctggtgactcaaatttatatctccagccagaacctttctcctgaattccagattcacatatccgactgtttactaggtgcttgataactatatctgtacttttcatcttgtttaatccaaatttacttcttttgcattttccttagttcaataaatgacaactttattcttccagttatttaaaccaaaaatcttagagtcattcttctcttccttccctcatatttcatgtctgattctaaaggaaatcttgttgcctgtactttttctttctttcytttttttcccctttttttgagtctcgcactgtcgcccaggctggagtgcagtagtgcaatctcagctgactgcaatctctgtgtcccgggttcaagcgattctcctacctcagcctcctgagcagctggggttacaggtgcatgccaccatgcctggctaatttttatatttttagtagagactgggtttcaccatgttggtaaggctggtctccaactcctgaccttgtgatctgcccgccttggcctcccaaagtgctgggattrcaggcgtgagccaccacatctggctttttttttttttttttttataaacagtttcacttcgtcacctgggctgaagtacagtggtgtgatcttggctcactgcaacatctgccccccgggtttaagtgattctcattccttggcctcccgagtagctgggactagaagtgtgcgccaccacacctggctaattttcttatttttagtagaaacgtggtttcaccatgttggccaggctggtctcgaactcctcacctcaactgatcatctgcctcggactaagtgctgggattacaggcctgagccaatgcgcccagcctactttctataaaagtcgtcatgtctctgcccccaccccccgccaccccccacatagtctgtttcatttgattttccccttagtttagtgttttattttgatgtttcttcagatgccttgggatcatttactgttcctcatatttaagagcaaatgcttaaaaattcttagaaataccttcttgaaaagcctgcattcctaccacctctcaccacttcaacatgaaataatgatcccttacatctttttagtgtagttatataacttttgattggctcaataattacttttattatggctgtgtaagtattattaaagctttagataagccatggaatatgctgtgattttattttcattcttgtgcagctttttttttctccctgagttaatacttaactgttttttacctaccagtaatttatatctaatcactctggaaatataagcccctcagtatattaaaacagatctcatgattcagtaataaacctccccctccaaatatatcccatcacctctactccctggaacattcttctagtttggactgtagaactgattccatctggaaccttcctttaccatactcctgggtattcctgttggctgtttcatgttttggaattactgtttamtgtgtcttgtgtctccccccccccccctttttttttcctttaagacagagtttcactcttgttgcccaggctggagtgcaatggcttgatctcggctcactgcaacctctgtctcccaggtttaaactattctcctgcctcagcctcctgagtagctagaattacaagcgcccaccaccatgcccagctaatttttgtatttttagtagggacagggtttcaccatgttggccacgctggtctcgaactcctgacctcaggtgatccaccctcctcggcctcccaaagtgttggtactacaggtgtgagccactgcgcctggctggatctaactttttttcctccttggtttactcgctcactttgatggattatgttgtcttgtgttttcccaagaaaagaattcaagggaaatgaattttttgagaactcgcatatctggctgtatttttgttggattcttatatttgatggatagttctggtttgggattttagagtaggaattattatcttctcagaatttcgaaagttgttgtgttgtctcagaacttccagtgttgtgggagagaaaattaatggttccttttttttttttttttttttgagacagggtctcattctgtcacctaggcatgaatacagctcactgcagccttgacctcccgggctcaagtgatcctcctgcctcagccaccaatttagtttggaccacagccatgcaccaaatgccctgctaaatttttaattttttgtggagacagggtctcaccatgttgcccaggctggtcctgaactcctgggctccagcaattccccccggcttggcctcccaaagggctgggattacaggtgtgagctcctgcacctggcccgaatgctgctttgatttccagtctgttgaaggtggggggaaccagccttttgttaatgtgagcttccagtgtttctttgtcttttgtattctaaattaataacacagtgatgtgtcttggtatgggtcttttttttttttctttttttttttcatttttaaagagactcctgctatgttgcacagacttgtgaattcctggtttcaagttatctttccccctrtgtcactcaagtaatgtggactacactcatgtgacaccatgcccatctttatgttgtgtatcttatttttgttttgttttactcttgaatcagctcagtctgaaaatctgtcttttaattcatggggattttttagaatgatttcttggagggttttgtcttttgaatgtgtggtcccttctctgcctagaayttttttktttgaatgagacatggtcttgctgttgtccaggttggagagcagtggtgcaactatagctcactacattcttgaatttctgggctcaagccatcttcccatctcagctttcagaatatcttggctacaggcatgtgacactatgcccagataatttaaaaaaaaaaaaaaaatttcttgagacagggtcttgctatgttgcccaggctcgtcttgaattcctgttctcagagggtcctcctatgtttgcttcccaaagcattggtattatatgtatgagccaccaccactagcacttctgcctagaactcgtaacaaaatttctttcccccatctgcatagtcttgtttcattaaatgattcttccctttttaaagtttagtctgtcttttattttgatgcttcttcaaatgccttgggatcatttactgttcctcaaatttaagagctagaagaaatctctctaagctccatgcatgagggttctcaacaggtggattttactccagtgtgatttcactagaccatttatttgagggtcacccaattgtcagtatatgtatatgagagagaatatgtacatatatatctgagagaaattctctaatcacttgtcctgtgtgagtatatgtactttgccagttttcttttggggtgaggaggagggacagtgtattagagattttactgttcaaaatgtagacttcctcagttttcagtaaaatactctaccctgtctatatgtggattcccctattccagactgattcacccttttcagtgagttagtcgtgacatttcttacactgtgagggggagtggtaattactttacagggaggtatggggccatggtgtttgactcttctttcaaccacttctgggttttttagtgaaaacctctatctaacactgatactttcatttctgttgtctattgagtcagttaacactgatccatttatttttcagttcccaaaatcttgctttgccattgcttctattttattgtctgggggtgtttaacacctgtttcattttttacagtcatttagtttccagattttagtaagggacagaggggaatagatggactcatttcatgatgtagaaacaaatactccctgtcttgtcttacatgaaaaattattcttaaactaggccttrtctttgagaacctgatcaaagtataaaaaatactttttggctttatttctttagtgagtcactattccatattttgaaggtgttaagaggtatggtaaaggtggtacttgaacatttccaagcaaacgtgtgatgaaatctttcatcaatgtcttagcaatggtatatgatttttttagtcttagcaattttagataagttttttttttgtcttgtttttttgagacggagtcttgctctgtcgcctaggctacagtgtagtggcgtgatctcggctcactgcagcctctgcctccgagcggggtccagcgattctcctgcatcagcctcctgggtagttgggattacaggtgcatgccaccacacccaactgatttttgtatttttagtagagacagggtttcaccatcttggcctgactggtcccgaactgatctcaggtgatctgcccacctcggcctcccaaagtgctgggattacaagcgtgagccactgcgtggcctgaggtaagattttataagaagcctacaaagccctaatttttacattaagaacattaagtgcttctgatagttttaagttccgtagtctttatttcaaagaattatttcattctgaatttctatttaaattagtctagaatatgtttataaatttatttacatttggttgaaatgtattcttaaaacttattccacagtttccagtttgaggataaatgaggtctaaagacagtatgaacttgttaataatttttcctattgtcctttttagaaatcttacatatcctttagcctaattatagattggccctgcaagcatgtcactgtatcttttatgtcttcctgagtcttagcactttaaattcttctatatccttcactgtctttcttacagcaccctaaaagagtagcatgtgaactgttgctcttctctaaggtattttaggacatttttaaaataatatatgagtggttgtcatgctaaatactgtctaccacaactcatacaattaaagtggtcaaagaaaggtctctttcatttcttttttcattttaaaaagaaatgttatttgtaaaacagtatagtcataacacagatatggcagttttttagtttttttttttctttttcttcactgtgtcatccaggcagtagcgtgattataattcactgcagcctccaactcctgggcttgagggatcctctcactgagccttctgagcagctgggactgcaaacgtgtgccagtactcctggctaatttttaaatttttttgtagaattgaggtgtttttttaaatttttttaaagccttgtttgcaaactgttgcaacttctggcggctgcaacttctggcctcaagcaatcttcctgtcttggcctcccaatagcataagctaccgcacccagcccacaattttctttcagtacaatataaacatcttgcaagcgctagcttgatttacactttttgtctgtatccacctcttttttttttttttttttttttttttttttgagatggagtttcgctcttactgcccaggctggagtgcagtggtgcgatcttggctcattgcaacttccacctcccaggttcaagcgattctcctgcctccatcttccgagtaggtggcattacaggcatgtgccaccacgcccggcgagttttgtatttttagtagagatgaggtttctccatgttggtcaggctagtctcgaactcctgacctcaggtgatccacccaccttggcctcccaaagtgctgggattacaggcatgagccactgcgcccagtatatatccaccactttaccatccacattagcatttcattagcttctctttgcccttttagttaataaccccatctcagggtgattcactttcataatccgtattaccatggattaattctgcatagcaaaaactatgataggtgtgttaagtaatgaagtttggggaatgttaataagatgatttctyttactgtagatgaaatacatygtaagagaatccctcgtgagaccagatcagttacatgtatatcttgcctctcttaagtctctaccatttattactgtacttgagttaggatttggaagtgccactgaacactaaaattattctgtctgggtatttgaatggtrtgagacaaaaatccattttaatgttttatcaagttgagatgtctcacatgagtagttagtgctgagaatcagacacaggcacatttgggagcatggcgtggcaagaagctttgctttttcctgttcctattgtactcaaacttgtttctacatttttcattgatttctcttcgtactagcactagggcgcaagagaagccgtactggaatattacactactcagcacaagacaggtttaatctttttcttgggggacaagattggaaaattgaggtctgagcagacctgaagagaggcatccagcaactctgagattaaattcatcattgatcaattcgttattgtttggaattgacgtttagctgtgttcctcactcagatacgtgcatgatagctgcttgctaatttggtcttagctcacatttcacctagaatgtatggtctccctctcccctgcaaaatatcccactgttgctaatctgtctgcctcataatttccatgagattgagcatcttgtttgttttgtcaccactatataacagcatgttggaaacaaagcagtaataaagctagaaaaaccaagcgaatacactggattawaaaaaatactgtttcctagaattaaagaaataaatgaggccgggcgcagtggtgcctgtartcccagcagtttgggaggctgaggctagtggatcatgtggccgagatcgcgtcactgcactccagtctagcaacagagcgataccttgtttcttacttaaaaaaaaaaaaagacctcatttgttaactgttaaacagaaaacaagaaattccctatacctgtatgcattrtagagcaaataagagcatcaaaaacaatcttagaaatctttcagagaaaggtcacctacaaaggaacattgatcagataatagatttttttttttttctcagatggagttctgctcttgtcgcccagactggagtgcaatggcacgatgttggctcactgcartctccgcttcccaggttcaagcagttctccagccttagcctcccaagtagctgggattacaggctcccactaccattcccagaatttttgtattttaattagtagagacggggtttcgccatgttggccaggctagcctcgaactcctgaactcaggtgatctgcctgcctcggcctcacaaagtgctgtgattacagggtgtgagccactgcacctggccgataacagatgttttaatagtaagataaaaagtaaaatttccagtgtgtcgaaggaagaaaattacagcctagaattttatcttcatgtacattatttaagtgtgagggaatagtttcagtgacattatgtcattgaagaccttagaagatttccctcgctaaaggagataaagcgactggcacaacatgtatttctctgagtaaktagaagtgttcttttctggctgtactgaagggactttcatgatttcttcgtttttgtactcttagttttataatattgcatagtagctaaggcctggctgtagcagttataaactgttctgcaagtgcgggaagtaatagttattcctatctcaaggatgtggggtttaaatgggttagtgcacaaaaggacatttattaaatttagtcataatcatctcaaggacatggtaagtgaaagagtgtacataaagtacttaatgtaatgtttgctacttaatgttcaataactcaaagagaccaccaccactactacattttacttttattagtaattaataataattaataattagtaattcagtggtaattagtatactaccaaagaaagtacttgagcagaagagccaaaattcaaaccatagaatcattttactgtgcttttattctacctcaaacactaatctccaggccttggataaagggattatttctctgaaggggaaagttatcctctttttgcccaagtcacacttgtgtcatttcttatactgtaaacatgtggttccaattctgaggtattttcccggyttgtaggacccaaaaagaagttaggcttgagaaattttaagtgaagagaacaattctagttcagagtgattggctcttcctaaaagctgacatttgactgaaaattttgaggggagggaaagaaacaataccttttacggcatgtaataggaagaagacctggattttagttgctgctctgatgtcccaacttgggtaaggcaacataacataaatgtcagtttcttcagatttgtgatgaagctgataatccatgctcagcttcctttatgggtctcttgcctatcaaataaggtacagtatgtgaagatacattgcagattatcttatgcattgcttcaggggatgattaaaccatcctttattatagccagagtctagtctaagggaagaaggtcattctctataccagtgaaggctccatccaaaccagtgtttgggggcatagtcataattgaaaaatgattgttttccttatctgtaaracaggtaaatggtattaatcctcaggtggttgtgaggattaagtgatacatgtaaaaaaaagaaagctttggatagtacctattataagaaactcagtgttgctgcaatgtatgtattataatggatttgaaatttgccctaaccaagagtcacagacagaaaaaaggaagttaatgtatctcttgatcactatcaagatgtggtattgaaccttcaagatccttttcagggaatatgtgagatcaaaatttttatactggcactatgatgttatttgccttttcctcatattcacaagtgaacagtggagttttacagaagctatataatgtcatgacatcactgatgggtaatagaatgtgtgcttgtatattccgaaactttcagttccaatttcttcgatcaatgtaatcctcataagtaaaagttatttgaggacctcagacatttttaaaaatgtaaagggggtggggtcaggctcagtggctcatgcctgtaatcccagcattttggaaggccgaggcgaacggatcacttgaggccaggagtttgaaactagtctggtcaacatggtgaaaccccgtctccactaaaacaaaaagttttctggatgtggtggcacacatacctgtaatcccagctactttggtggctgaggcatgagaatcacttgaacccagaagacaggttgcagtgagccaagattgtgcccctgcattctagcctgggtgacagtgagactgtctcaaaaaataaaggtgtacagggattgtatatttgacaacttggtatgtaggatgtgctacctctaatgttccatgctgttacttagttttcactcactactatattttggagatttgttcatattgctctgtgtacatttaattcttcagtgtgtatccaccacatttaacttattcacttacagaactatgcaagaatttctctggtaaatttcactaagtacttaygtacttttcagaacgattgtgagtttacacccctaccagcaggactgagttgagtacccatttcctcacatccttgccagtacttcatttgcctaatttttgccattctcataatgtggcaattgttcaattttgcatttcttccattttatttttttgcatctctgcttttcttttggttagctttgccagttctgcctattatattaatctcccagaatcagcttttagttttgttaaatctctgacatgtttcgttgattcctgctttcatcttaaacatttcttcgttgttaatttgtgtttgctataaaataagcaacatcttaaatgcttgatttgctttcgatgtttattctgtaataagatatttaaagatataattttttccctaaatgctttattagacttttctcataagttttgactggtactgttttcattgttatttaattttgtgttttttaacttctttcatgatttccttttaactgaaggttttcttagatatttagtttgctggtatattcttttaaaattgtatcattgctttctttctatattggattattgtcagagaacatgatttgcatgatattaactttttggagtatattgttgcatctttgtggcctagtacatagttaatttagtgaatgcttccagttgtacttgaaaagaatgtatattttctgattattgagggtaaatttctctatatatgttttcctgtttaataaatatgtagctatgtgcttatgttttgactgctcggttaattatttttgagaaatatatgtgttaaagactccatatttctgtacacaactgatacctggtatttgctcattttaaggtctttttagtaatgggcgaagtatagagaaagtagagctggttcatccatcacttgggtcaaaccctccatccttaaacagttgctcatgtgcaggtggacgcatcattgaagcttttctttctttgggcaccagagtcagggatagattcaggccccaaaagaccccacggtacttcctgggcccttgggctctgtcctgaacttctgtgtcctgaaatcctgcttgagtcttgagttgtgggactcaagtctcagaggtcccctccccagacaacctcctgttctgacgtcataggagaccatcaccccctccagccctcaataagtgcattttaagtgtacaattacatgaattttgacagttttttataagttacttgtaattttacttatatataaaatgtctataagctacctataatttatacttacatatgtatatatgtttgtataatgactggtaaaacctagatacagatcatttctgttatctccagttgtttccttgtgttatagcctagtcaatccctgccccacctccagcttcaggagcagccactgatgggattcttttcccccagtatagatcagtgattctcagttgggtgattttgtcctccagaggacatttgtcaagatcaggagacatttggttgttaaaactgtagagtgctattgtaatccagtgggtagatgctggagatgctaaacataaagcacaggacaaccccttacaacaaagaatgatgcagtccaacaggatcgtttgaggtcacagaaaggtgtgaacaaaggaggtgggaatcacggaggccatcttcaagtctgtttgccacataccccattctctgtctcctttctttcagagattctaactttagatcttttggatatatcccacatgtttcattcactactttagtcttctcattatttttttttctctgtgctcagtttgagatttttgacctgtcttgagttttctagtctcatatataacggagttatataatcttccagtttgttggtaaaatccattcagcgagttcttaatttcagatgctgcattgttgagttccagaatgcttatttaattccttgtaatattaccagctgaaattgtttatcttttaattcctttccctctttttttaaacaacatattaatcacgaggggttggtctcttcaatcccatcagggttattgggtttgggctatgttgaaatcttggtaaaacttagttcacctctagtttatctctttttgtttttttgagacggagtctcactctgtcgcccaggctggagtgcagtggcgcgatcttggttcaccgcaagctccgccttccgggttcatgccattccgcgtcagcctcccaagtagctgggactacaggcacccgccaccacgcccggctaatgttatgtattttttagtagatggggggtttcaccgtgttagccaggatggtcttgatctcctgaccttgtgatccgcctgcctcggcctcccaaagtactgggattacaggcgtgagccaccgtgcccggcctagtttatgtcttctatgagcatggttctccttggcttttgatttatagtcttgtgagtctctggctccttatccctgaaggactaatttagttttgccgtttagaggttttgatctaattggctcttgagcctctggttcccctgcagcttcaaaatctggcaagtgtcttgaggtggaggactcttagtagaatgttgttttctaagtaatttgagattatgggaaatttcactctttttagaggccaccagtctactcaccttttcatttgtagccacagaattcagcaaatgtcctgtggacaaaactatatgtattaggggtttgtcaaagtttaaatgtgtcatgccagactcagaagcagccaaaaacactgctgatctttttttctcttctagagatcctctatgtggaccaagcctgcctgatctacacacacacacacatatgcacacgcacacgttcaaacttattcaaatcctttatatcatttcttatgtgaactgcttaattttgagggaggttttaaaaatattttatcatgattatggatttataaaatttttattttgtcagttttttgctttttgtatgttgaagtcatgctgtcagatgctttaaggcacataattgttatataatttaattgacaaaacaatctctagccatagttctctcaggccttgttaatgttattcattttaatttgcttaatagtagtattgttatcccattttcactttgttagtttttatcagaaatatattttttcatttcttaattttcagtactttagttacatctgttataaacagcattattttagttttaacaagaagatttatagatttctcatgacttatattttcagttttgtggctcaggttttccttttgttggagttctatgagatttttttcttcatctcctctattcattgctattatcaactaagatgattttgattgggagagcctcaactcaggctggtttaaaaaatagggaaatttcagcacttactctaggcagggataataaaataaaaacaatagggtcggtggctcatgcctgtaataccagcacttcgggaggccgagtcgggtgggtcacttgaggtcaggagttcaaaaccagcctggccaacatggtgaaaccccatccctactaaaaatacaaaaattagtccaggcacggtggcggtaatcccagcactttgggaggccgaagtgggtggatcatctgaggtcaggagttcaagatcaacctggccaacatggtgaaatcctgtctctactaaaaataaaaaaattaactgggcgtggtggtgggcacctatagtcccagctatttgggaagctgaggcaggagaattgcttgaacctgggaggtggaggttgcagtgagccgaggttgcaccactgccctccagcctgggtgacagcgtgagactctgtctcaaaaaataaaaaaataaaaaattaactgggcatgctagtgcatgcctatattcccagctacttgggaggctaaggcaggagaatcgcttgaacccaggggtcggaagttgtagtgagccgagatcgcatcactgccctccaacctgggcgacagaacaagactctgtttcaaaaaaataaataaattaattaaataaagggataatttactacttcacataatagtgttacaatagccatgtggctcagatatgttccctagtggtaagaaatctctatgcctcaccttctttggtggtgttcaacccccatatgtggttttttccccttttgcttaccaacccccagaacaattcctgttggcccaaatatgttactggtggtgaatccatacggttctgcagcaacctcaattcttgcctcttgagaagaaataatttgaggggcataaggcaaaggagagacaggcaaatattagaggaggagtgaaagtttattacaaagttgtagagcaggaaatgaaaggaagtaaagtacacttggaagagggccaagtgaacatcttggaggtcaagtgcactatttgaccttggccttagggttttatatgctggcctacatctggcatctaggatcgcttttctggtggaatgcctctgaaaggtaatataccagttaaactctgccgttttgcctgttaatgtgcatgcttgaggttactcgcccaactcctgagatcttatcaggaagctgctgatcactagtcttaggtgtttcgtatatgttgggagactgcctttccctggtgttggctgtgaccagttatattatggagacagttaaccacctgatcatcacctgatggccacctgggatgtggggggaaccctctcctgccccacttatgcctgtctagctacctactgtaacaatagaaagcctacatttggacatgcttcagagctgtttgactctggttcagtgatgtcatgcaggtatttctagctctcatcatgcttttcttcagtggcagcttcattctcatactggtagcaagtgtttccaggcatcacacccagaaacaaccacatccagaggatgaagagagactacatttttggtgctctcctaggaacaagataactccctcaaaacttgccatgagagttcccatcatgaatctttgtgtcaaattcctgaggcaatctctggcaatatatgcaaaattatgttttgctgctccctggatgtaggggttggatcagcttccaccaaggtatttagctgcctggggaaatgggtggataactgaattacattggtattactctgttaggaaggaaaaagtaggtaggggagaatgttgaataagccgggaatactgtcccctacaaatgttcaaggattttccttttatttattcgttcttcaaaacctcaagaaattattattattattattattattattattattattattattattatttttgagagagggtctcactgtctcccaggctagagttcagtagtgcaaacatagctcactatagtctcaacctccttggctcatgtgatcctcctgcctcagcctctgaagtagctgagaccacaggtgtgtgccaccacacccaaccaatttttttatttttaaattttcgtagagacagggtcttgccatgttgcccaggctaagaaattctactagagaggttaagtagtcttcttggttccttgctggaaaacaaaaattccataaacaaagttttgctttatgaaaggggaatgattttataacgtaacttgacatactagtaatttaatatttgtattatgaatctagtcattgtttgggatcaggccacatcaccccaaagtctctatgactgcaggagaccataatataccaccccaaaatatgcctctttgatgaactgattattttgaactgcttattttaagaaactgcagatgcaggagtagttctgaaaaggtgcccatttgtaagataaatttacacaggaaatctccacttttaagtgccaggcaaggtgtcaaagcccgggcagtgaagactggttggctccctgctggtaaaagaatttaccaacaatagtataggtttgaaaaggaaagttttattagaaagaacactgcagcagagtgtactgggacacttcagcaagagaggactgagtgtgcagttgtggattttccgtaggggtatttatggaccttaaagcaggagcttaaggatactttggaccatattagtaatgtaggtcatgataaatggttacatgtgtagacattttggtgccttgatgtcagcgaagtttgcacaatgggtttcaacatgcgtgcattctggagatgtattgaaattcttgttacttacacatttttgggaaagaggcctgataccagatgtggctttagtcagaggtgtccaatatatatatatttttatactttaagttctggggtacatgtgcagcatgtgcaggtttgttacataggtatacatgtgccatggtggtttgctgcacccgtcaatccgtcatctacattaggtatttctcctaatgctatccctcccaccaacaggccccggtgtgtgatgttcccctccccgtgtccatgtgttctcattgttcaactcccacttacgagtgagaacatgcagtgtttggttttctattgtgttaatttgctgaaaatgatggtttccagcttcatccatgtccctgcgagggacatgaactcttcgttttttatggctgcacagtattccatggtgtatatgtgccacattttcttaat

SEQ ID NO: 95850 - DNA, 86980 bp, Homo sapiens
  misc_feature (1)...(86980): n = A,T,C or G
ttttttttgagacagagtttcactcttgttgcttaggctggagtgcaatggtgcaatcttggcttactgcaacctccgcctcccgggttcaagcgattctcctgcctcagcctcccaagtagctgggattacagggacccaccataatgcctggctaattttttgtatttttttttagtagagacggggtttcaccatgttggccaggctgctctcgaactcctgaactcaggtgatccacccacctcagcctcccaaagtgctgggattacaggcataagccaccgtgcccagcacctgttgaccatttttatgtcttctttagagaaatgtctgttcaggtcttttgtccatttttattttatttatttatttgtttttgagacagagtctccctctgtcatccaggttggagtgcagtggcactatctcggctcactgcaacctctgcctcctgggttcaagtgattctcgtgtctcagcctcccaagtagctgagactacaggtgtgcaccaccacgcccaactaacttttgcatatttagtagagatggggttttgccacgttggctaggctggtctcaaactcctggcctcaagtgatctgcttgccttggcctcccaaagtgctgggattacagatgtgagccactgtgcccagccttgtcaattaaaaaaaaattttttttttaggttatttatttttctgctattgagttgtaagagtcctttataaattttggatactaaccccttaccagatatgtggtttgcaaattttttttccattccataggttaccttttcattttgttgattgttccctttgccatgcagaagctttttggtttgatgtgtcccatttagtttttttgcttttgtaccctttttgatataatataaaaacaaaaatcattgccaaggccaatgtcaaggagcattttccctatgttgattttaagatgattttagtgtatggtataaaggtccaatttcattgttttcatgtggatgtatggttttcctagcatctttattgaagagactatcatatacggttgaatttatctctgggctctctattctgttccactggtttatgtgtctgtttttatgccagaactattctgttttgattactatagctttgtaatatacttttaaatcaggaagtatgatacctctaacttttcgtttttcagtattgctttggctatttgggaatttttgtggttgcaaatgaattttattgttttttctatttctgtaaagaatgccactggaattttgatagggactgggttaaatctatatattgctttggataaatctatatattgctttggatgaacattttaacaatattaatttccttgctggaatagcagttaggatttggtgctctctcctgcagcttcttgaagtgtgactttgctaagccttaagcaattaaacacattatatctctggaaacatatataagaaactgatagcagtggttgtccccaaagcggggaaccagatgttgggaagcaggggtgggagtgagacgtttcctgttgcccttttactccttctgaattttaaataatgagaatgtatttaaataaatagaaatgaggcactaaaaattagtgtatttttataagtcagatactatcttgatttagattctagtaaagtggtagtaagatgcaaacatttttaaaagatatgagatattttttatttttattttttgagataaagtgtcactctttctcccaggctagagtgcagtggcaccatcagtgctcactgcagcctcgacttcctggcatcaggtgattctcccacctgagcctcctgagtcactgggactacaagtgcacacccccaccgccacctaattttctgtatttttagtagagatggggttttgccacattgcccaggctggtcttgaattcctgggctcaagtgatcctccggccttggcctcccaaagtgctgggattacaggcatgagccactgtgcctgatcatgagagaagttttgtgtaaatttggaaaatactaccactctttgattctgtagatccggcaccttggtctggtgttctattggagcagtttgggaatcatgactcttaaggaaagagaatgttgacagtcaaaactttgcttggatatgctttagagaatttcacagtgatttgaaaagaacactctctgtgatgtgctctttaaaaccattacacaaccattattttgatgttgtggatattactttttctcgcatcatttttctcaacaaaaggataaggtcagtaagtgtatatacgtttataaactaaggaagttaagtaatgtaagcacaaaccatccaaggaatttgttagtgatgcaatcctggcctctaaattgctcttgaccaaggagcttcacatatgggaaggatcagaaattctatggcatggaatcaaagacactcttcctgcttcaggggcacatatagattagtactgtcattgcagtttcctattagatgattcttagtgaccaaatctctgtctaggacccagataccttatttactcaaaatagtggacggaaaataaacgtttgatatacatgtatgcataatattttcatctacataatttttatttccctgagtgttttttcttgggtcatatttaaaactcatgccagccctgtgaagaaggttgtcattttttttttctgatgtacacatgtggaaaaagtgactggacagaatcattctattgataagtagcacagagtcaggcattttgattcttgggcttttgttcttccccctggaaaatgcttagtgacttgatctggaatgccatcctctcttttcaggttttgacttgatctttaaaattatgctcaaaattcttccccaagaggctgtttcaccaaagcccagatggtttttgctggttccaagactcccaaaaacttgtttccagtattttctattatatccagtatctattatttatcacattccagtatgaacatggaatatgatttattgtattgacttacagaatttgctttattgtatttatttttttcttttctttttttttttttcttttttgaaacggagtctcactctgtcacccaggctggagtgcagtggcgcaatcttggctcactgcaacctccgcctcccgggttcaagcgattcttctgcctcagcctcctgagtagctgggactacaggctcgtaccaccacacctggctaattttttatttttagtagagacagggtttcaccatgttggccaggctggtctcaaactcctgacctcgtgatcacccacctcggcctcccaaagtgctgggattacagacgtgagccactgcgcccggcctgtactgattttctttctgctatttgtctccctttcttattttatgtaaattattataaatagtactactcctgacttacagacatttacattctgtttttaataacttctagatgactagagaatagtagttccaaacttttgtgtacataagaataacctagggaagttattaaaaatagacttctcagtgctcttcccataggttctagttctgttggggggaggcgggggaggtccaggaatctgcattttcaataagcaccccagaggatgctgatgcaggtgatccagtaaccacgctttcagaaattctgctgttgagaactaaaaatgtgattgttatcctctgctcagtaggggaaacagaggtgtaaaataaaataactgagttcttgctctcttggtgttgacaaactttcagctgtgagtggtgtggacactaaatgcaataggaatacaaagaagggaggcatcacttctggctggattgtcaagcttcataaaagatagggggtttgaagaaaagaaatttcaaaaagatgaaaaaaaaatgggccgggcgcggtggctcacgcctgtaatcccagcgctttgggaggcggaggtggccgaatcacgaggtcaggagttcgagacaagcctgggcaacatggtgaaaccccgtcg[132 bp omitted]ttgcactccagcctgggtgacagagcaagactccgtctcaaaaaagaaaaaaaaaagtggattatttcaagatgttggaacagcaaagactaagtgttgaggatgcataacttcttttaggggatcagtatgtggaatgatgtgcctgaactaaaaagagtttttgtgggcacatgtaggaatttacacttggaaagacaggagtcagatcgcagagagtcttgaatttggactctattctgcaggtattgggtggttcctcaaacacgcaggtaagataaaagtgatcttaaaagattgatgtggcagtgagtttgaaagccgtgaactacgtttggcggtctttgtacacattgggagaaacgccaattgtgaaagtagatttaacatgatctggagcttgactatgtgagaaagcgaaaagtgtcagaaacgctgctgaggtttgaacctccttgactgggaggattatgtacaatttcaccgcccagcaaatctgaaggaggaaatgttttgaggatagtatgtttggttctaggtctagaattcaacttcctgccaaatttggaatcttctgtacatatgcatcaggtggcttcgtttaaatatacgacaattacttttattatgttgaaaggaaaaggtctggagctcgagggaggggattacagatttgggtccaytggcgcaaagggaggctgactgttcagattaataattattaacggccaccgtatggaaagcactgcacgaaaaactaagatgaccagtcctcgtccttaagaaattcaaaatctagacggaatctccaagaaagagattccggtaagagtacatggcaagcctccatatccacacaccactgaccaatgaatttgtactcttctcgttggagtagttgagggcctttggctcaaggaggggtgaaaattagcaggatactaaattgggaatgagaaatctctttttagagggcgtggacttgcagaactctttgaagcagcagatgctagactgcccaaaccccacgcgagagtagctctctggagttgcggagtccgaacctcccaagagctacaaatttattccgcaactaccaattttgcggtttggggccagtaaggcgccaagacccgcccaggtgtccagacctcgcaacgattggacgagctcaccttctcgccttccccgggcccctcgcccgtcaatcacactgcttgctcgccacctgacctctgctgcgccccctttcagtggtgtaacacctggcgctctttcgcgccccagccctccggcgccccaccaatcgcttcagttcttcattggccagcagagaggtgagggaagggaaggggcgctctattttgctctctgaacgcaccctctcaagtttcccagtcttctcgtagacggtcaggagagcaatgacagcctggagcagtcrcgcgtgarcgcaaaaatgcccgctggtggaggagcgcttcccctccctcccaagcgatttgccgcatttgttctgacgcaggggcaccccgctcgccgtcttcacttacgattggctgtggccgaagcccgtcacacagcccgccccactcctctgcctcaagaggccgcacctcacgccgtcgctgccgcttagccgtgtgattggctaagagggctggcatgctttcccgccccctyccccgccgccgcaccaagaggcgggcgggaccccgcggaagttgtcagtcaaacycctccttcccaccccttgcgaggcccctccccgggccgcgcgccctggcgcgcgcacacgcgcacacactccccagtcgcctgtaccaaccaccttctcaagttgtagcggtcgctcgcctggggttctccgtgggcggccgacgggcgcgtgggggagggggttcgggccgcccagcgcggcaaggagcgagtgtgtgcacgcagagggccggggctacggggcagcgccccgggcgatgaggggccggcgttgaccgggaagagcgggcaccgcggcagtggctccgaggggacccgcgatggcagcgccctgagaggaggctccaggcagggcgggctgcgctggcagcggccgctgaggtgctggccggccggctggctggcgacgggggcagaagcgacgagaggcgcgctcggcacccgcacccccgtgcccccgcctcagttgtctaaacttcgggctctcttccacccgctctgcgcgcccagagtcaacaacttcttcacccccctccgcccccgcccttccctccgtcagccccgggagctcgccgcgcgccggggaccaggaacctccrgcgctgagatgtggccgtgaggcgttggcgggcggcgaggagaagctcggcggcgtcccggggccggagggccgtggggccggggcgcaggggcgcgagcaccccgcgcctctcccccgcctcctcctgccgtctccgccgctgcccgtgccttgcaagcagcagccggagctgccaagcgtcagggccgcggagatgtcgtcgtcgtcgccgccggcgggggctgccagcgccgccatctcggcctcggagaaagtggacggcttcacccggaaatcggtccgcaaggcgcagaggcagaagcgctcccagggctcgtcgcagtttcgcagccagggcagccaggcagagctgcacccgctgccycagctcaaaggtaacctccgagggcgcagccccagcagcgagcgcaggggctggcaacgcttgcctctgcgccagcagagccatttcctgctgggtttctcctgctcagttgggactggtagtgtgtgagccgagttccccacaatgccttggcgtcacctcacgccctcctccttattcaaacaggttttctgtgaagtcttggctgtttccttctaattcccacctgaactctttccatcctaggggaggccaacacccttccccacctgcgcgcttgcttaacctgcacttcctatcttgcgtcccgtgaagtagagtccttcactcctcttccaggtttgccctttcccggtcttgctttaacaaccgcacgaaccttccccgaccttcactttcccgagtgtcagctcctctgttcggccacttttagctagtcctttacttttacagttataaagccgtctgcacccaccttcttctcaacttcacttcccattgattgcccctaagagtcatcagaccaggaatccgaatgcaaacaacggttaagagttagctggcctttggatgtatttataaagaaaaagcctaaaatttgaccagtgtagtatcttattcacaggatcgttagctttaaatggtatcctttagctcaaggaatagatttaaaatattctgttgtctgagccgatacacatggtctatttggaaatacgaaggagtaggtagtgttgctttgcagtcgaatgggaacttagtttgccaggcagtgattccagggactttgtaggtttgtacaggaattcaaattggtatccgtgcctaatgccttgcaggagaacttggcactctttttggctcacttttcccactaggtttagaggattttcgatgttatttcctggtgttctagtttattctttgtgtattactcatgcttaattttataattttaatgtccttgctttttatgagatagaaatgttggaacaagatgataatgctcctacatatttagataaaatttgcaacctgacggaaatccctatcatctgatgttcagatttttcaattcatttgaaaaagctgcagcatccccttcaaggccagtctggttctcatttgtctttgggcctgtgaatccagccttagtttggcaaggagtctaaagaaaaccccagatcaaatcacagttgacctacaacagctccagaaccctattgagaccctaccttgccctgactcttggagtgcttctaaatcatgacatctcacagttagaatcaaactggcttttgaacagagattttgagatattagtctgtgctatcgaatttatcatttgattgctctttagcatataaaaattgttaaaatttacatagcaaaatggtagactataatgataggcattgccaagactttaattcttgaatgatgtcatagctataaaagaatatcgtctttgctattcatagattttaaaatttacacttatttaaaatatcatagtttttttatactactgattttttttctcccrttaaattgtcaaactgtagtttgaaggtttggtgctagggttatttcatagttatttaatttgctttttagtaagatattctagtttcttagtattgtacttcttaatagtatactttaataaaagtaattgaatattaaacatttggttggtttcaagccaggagatgcagctttgataggttttgcttttattttatttattttattttattttttcactttcgttgctcaggctggagtgcaatggcgcgatctcagctcactgcaacctccgcctcccgggttcaaacaattcttctgcctcagcctcccaactagctgggattacaggcatgtgtcaccatggccggctaatttcgtattcttagtagagatggggtttcaccatgttggtgaggctggtctccaactcctgacctcaggtgatcaggccacctcagcctcccaaagtggtgggattacaggcgtgagccaccgcacctggccacattttgcttttaaaagcttggaaaaatatgcatagagtcagtaatcatctaagttatatgatgtagggttcaacaagttgaaggtgccatatagtatttggtcactagtaaagaagaaagtaaattggaactttacattaattgtagatatttgcatgaaaatacagtattcatcataaggaaaattatgtattcaggataaatttatgcaaatttaattgaggaaataagacccttacttggattacaaactaataggaacaacttcttttactccagatgccaaaatgcttgcaagtgatttaaaaaaaaaacaccaacattcaattgcttcaattggaactttggcagtgtacttgataccacagtgttgtgttttttctgccagtggtagttttttccatttgtggccttcacaaaaacatggaaagccctttagtatgtgtatgaaagaaagaattttcttcctcctctgaaataccatcttactgtggagtgattcagatatccatggactccaagatcttttaagtttcataccagcctgcttatgttactttgaccacatgcatctgaactggaaaggtgccaactagttttcctcaaaccatagtaaggattaacaaaataatccagccttttcacctgtaagaagtatttgtgcaaaataatttagtaagtgggttgtgggattttaatggcaaaaatgttcagaataaattgttttataattgaaagtatttaataaacaacaagccttgttaaaaggcttttcagtctaacctattttgtttaagattctggaaggcttggtttggtaaagtagttgatgccttacatttatataacattttagcattttraaattattttaccttaaaaattttcttaaattataaaacagtattgttcataccaagtgaaacaatccaaagatatgtaacccttaatccctgtgtatctcctgctttttcacacctagtaagtaagggtaatactgttgtttgataatccatggctcattgtatttttacaaacatcctattcattgggtcatccctgaactttttgcaaggtcagtattcccattttattgatgagaaagttgaggcctaaaawgaatagtttctggcctgtgattacttatctggatgatgttgcagctgacactgggacctaggtcaaatgatttcagtatttgtgctgttaactgttttatgtaaatttgaagcagtgtgatagagttgggtctctggggttagtcctgggtcaaaggtaaatttttaatctttctaagtcgttttccttatctgtaaaatggggataatacaaatctccccaggcctgtggggattaaggggaataatttaagtgcctaaaaataggcaaagaatgttagttcccattctcttaaatatttgaaaatccagattaaaaatatttttaaatgaaggattattaataggattacttacttaaatggtaaactttcctagtgtatttaaagtgattttatttataatcagttttcagatatgatttatgtgatctgaagtgcagctgcaacatctttcagcacgagtgtagaaatggaaataggattaagtcagactctttaaaacattaaaagctgtgataagatttttttaccaagcgaagaaatcaacctaaccagtagaattatatagatgtgcagtcatcttaggagacagccgggaaataaatagcaagataggctgaaactggctttgagattgaagtccccttcagaagaggtaaaactttcccaagtagcactcaagattctttgttggtccattcttagcaactgtgtcccactagaggtattgaggccagtaatagtggtgttgattgcagtgcttccttacctttagggggaaaaatgtgtgtgttttctaaagtaggtgatctaaggtaattgtggaacaagaacactgacattatcttaagttctatagctaaacctttttgtggagagaaaaccgtactactcactcaacttttaaggtttatagatcttctcaaagttactatcattccatctaaacacagttgggatggcactagaggagagttcaaattcatctgaagatgttaagaaaattgtttacwaaaggaaataacattttagtcattttaggactattttctgagatatctcttctggaagatttatttttaaaaaatttaaaacatttttaggatattcttaagagaaattgctaaataaagtgttcactgctagtcctcacataaaggaaaaacttttctatttaaacccattttaacatctttagaattcctgtttaggatcatctcttcctcctctccaktttattaccttatctgattgttaattgtggattattttatgaagtgtctaactgaataaagtgctaatccaataaaatgtatttggtaaaataatgcaaccattgtagtatgttactgtcatgtaaacagtagatttaaattgtcttcctgcatcagtgatgactcattcctttcaacttcagtttagccattttcacctgcaagaataacatttttctcttgataaaataacaaagatgaattagtctttaaggagttattgctgccttggatttcaaagacaggtttactaacagaaataacacatttagatttttgtgtttcatttttaaaagttagatttttgtaaaaagctggggataaagactagtttgtttttatgtgtttagcactgtggttcccaatcctggctatacttggagaggtcatttattttattttattttwttttttttcagactgagtctcgctgtgtccccaggctagagtgcagtggcacgatctctcggctcactgccacctctgcctcccaggttcaagcgattctcttgcatgcaccaccatgccaagctaatttttgtatttttaggagagataggggttttgccatggctggtcaggctggttttgaactcctgaccccaggtgttctgcctgccttggcctcccaaagttatgggattacaggcgtgagccaytgcacccggcctatacctggagagtttaaaacaaaacaaaacaaaacaaaaaatcaatacctgggcacatccctaagagattgtaaattaattggcctaaggtaaaatccacttacagtatttttaaaagctcccagggtgattctaacgcgcagccaggattgagaatcaccgggttagcattgtctgtctattgatttaattcattaattgagacttcgtccttttctctctgatactcatggttcattacccagcctattaacatttcctgccctggcttcacctcctgctatttacatttcactctcttaactttgctgccccctatagcttattagctgctttcctgaaggggagatactgccattagattctggagtttaggtatgatggsatgattctactggtttattgtcattaccataattaaagcccaactattatttgatgtagggtggtcagttttcttttctctgtgatttttggagctggcaggtaaaatcgagaacatgtgatagaggtttgcctaattttaatcccatcattcaggataataagtaatgatttcaaccactttgggatgtaaaactagtttcctctgtatgctcacaacactgttctgtttcttgaagatctaggcctgatactaccattgtatatgttaaatacaagatattgaacaaaggaactattcttgaactttactgcgtttttggtcatgccttatttttatttcacattaagaaatgtttttctccagagtgttttcgtgtctatcatctaacttaatcttgaccacaactttttatcgaaggcagggcagtgagaactcagggctgcttatattccatattcctattttgtctttgtcttttctggtaactggtttgaataatacttctgttagttgatttgttgtttgggtggcttttcagttgttatgttgtgatgctctctctccagaatgagatggtgaatttttctgtgaaagcagagtcattatctgttttttcaaatcctgttatggtaccaaatacagtattttgtgcataatgtggtcatagagacagagtcagtgttttgatgaagaaattatatgttggttgtcttatagtcactccttcccctttagattgtgctgcttttagtgatgtttggtgctatctaccagatgttgattcttttctgttttgttttttggttttccatatttttttgagacagggtcttgctctatcacccaggctggagtgtagtggcacaattgtaacttactgcagcctcaaacttctgggctcaggcaattgtcccaagtagctaggactacaggtgtgtgctgccacacccagctaagttttttatttttattcttgtacagacaagttctcgctatgttgtcctggctggtcttgaactcctggcctcatgtgatcctccgtctttggcttcccaaaagctgggattacagatgtgaatcactgcctcacccagttttttggttttaatatatttatgcctaaaackggttcaggattatttaaaacaggggaatccaagggagagaatacartcatgggttcttagtttctgtttttggttgtgccagtaaagccccttcctcgtccttcttttctgcttatcactagagacagaaactaaaaaccatggcttcaggatgctaaaagcctaaaacaaaacgaaacagaacaacaacaacaaaataaggtgggttggacaagcttgatttaaagtaaatgaattctgggtccttaatatcttggtagtaaatagtaaatgtaggtttaaaacaaaagattatttgtattttgccaatgaccagtatgagtgacatgtaacattattgattgatttgttgctatgaaagttaytgtataagatttgtgaggaaaagtaatacygggttgactcctagacatggacatgtgtgtataaaataactgaaacaatttgtttgcagtaatttctaagtttaagatgcaatctttctttataaggatgtccttgaaggaggtaaaaggaacagatttgaaatatataatacttttagtgtattattatgtaacaaggaatctaaatgctttgctgaaagagttttrtatgacagactgggattatgcaaaataaactctacttctctgagcaggatgttgactaataagcagtttcaagcctagtttttatatctgtctttttgaactgttacctgaaggattttatttatgtgggacttttaagtaagtaatgaagaattttagaaatcctgtaattttgattgggtttgctgaagaaacatactggaatttttttttttttggtgggggtagtctaacttggatactgaagacaagggatttcttggaaacacactcctcctactggaatggtgatgctaattgccgctactatataaccttactgtgatgttatatctagttgagctttccagtgctgaatgggatctcagaagtcattctggtttagcctctgttgggaattgatttcactcttgttattctaataaatatcttgccatttcatcagagaagttttctttaaggtagggaggaaagtacagggttttaaaacccttattctctcaggttttgcttagttaatgaataaaccatttagataatagctaaaagaggttgaatacctgaaacaagaatttttaaatggcttagaacttgcagttcagtagtatcaaatctaaaattgtatatttttttycagcagaacgcagattttaaaaaattgtatattttgtctaattggttttgcctttgtttcacattgtatcaaggatattccataattacagctattaccataagtcaatggttatttgaactcattgttaatcccctgcctctaaattgataaaagtgaaaaagggaaaaaggtgagacagtttttgttataactcctgaattttaattagcaaaactgggtagatttttaaaacaacttttcagacaggcttttctgaagaaaaatatctattgaagttaaaagtaaaataagacataacttctgtaggaatgtttctaattttattaaaacaaacaaaaacaacaacaaaaacgtgccttaccattcttctttaaattggtcagtggcaaaatattttgtttgctgtgaaattagacacacactttattttcaaaaatctagtacagaaatcttttcctttctttgrttttccatagtgcataaaattttggtgaaccgctgcagagattaaaacttagtaaagtgaaaacaatgaatgctttttcttttaaatttaatgtctttaggagtttatagttggtgaatacagacttgtaagcaggcagttgcaattaatgtgttcagtgtcatgataagaataagctctaaaatgttaagggagtatgtgaaggactcaatcccgttttagtaggggaggggagygatcagggaaagtttcctggagaaagtgacaggtaaactgccatctaaaaggccagaaggtgttaggccaagatagatgggctaagaggtccacccaaaagacaatatatggagacccaaaggtaattgagyatagcatattttgggaattaccagcagtttacatagctgtgatctagaatataggttacattctatatctctgtggtatattctgtatcactagagaagtggaacagcatttagggtctagtgcgtaatcttgttgctatgttgaagaatggatgtaggcaatttattgcattcatacctgccagtaacatgaagaacgtattgggaaatcagagtgagtaacactagtgaggatactgacacagtaatccagacaagagataaaggtgcttgtccaagtggggatggggtggtatcataggcaaaatctggtgagagggaacaatcaacgatgatacatttctaacttgggcaactggatgtatgatagcagtttattgaaagggaaaaaagacattagatttgggaggagaagataatggttctttgttggacaggtcgaagtgtccatgggaaattgaagtgaagctgcctagtaggaaggcggattatttggatatggagcaatgtgctagagataatttgagagtctttggcttacatgtggcatttggagcaatggaagtagaagcaactgcccactgaaaatggatagaatgagaagactccaaggaataccaacattgagataatgggtaagggaaaaaggtacaaccaagagccaagagagrcagctggagtggaggccaaagaagacaggagagagyggagacaaggctgtcaggggaagagagtctttaaaaactgggggatgggtggggaaagtagtaacagtggataactgtggacaagtcaagtaagaactgaaaagtttccrtgggttagtctttaggcaacattggtgacttgagaggcgtttggaggactgataatgtgaaatgagatttgtgtaaggtggataatgagtagaaattgtaaaagctgagtgagtaagtatggacaactctttcagaaagtttggcagttaaaaattactatagctactgggtagagaatgcattgtagcagaagaagatttttaggaggacaagttaggagattaataagccaggtaagactttatgtgacttgggcctgggtagtagcccaagatggagagaagaagatgcatttgagatatatcttagataggaccttgttaatgaattgtttgggaggagatggaaaggcagaggtgtaggagtcaaggatgactctcacgtgctttagcttggacacctgggtggataggaatgtgtcccaccaccgagaaaggagtacactggagggggaatcaggtatagagggaaaatccagagttgtattttggaaattttaaatttgagatgccatttagaaacccagttataaatatcaaatagatcactgcatatgtgaatcaaagagtgcccatttgttaatttctatacattaactatattctttactaatgtcttctaaacattaactgtattctttacattaacctttactggcctgccaagactttcagatttgcttataagaagacattgatagtttgggttgctggccacttagtctcctggccaaattgggattatctattccctactctatagaacatcttctgtgtacactgcatgataagatgtcattgttatgtgcatgaaggagagcacaaaatatgccgggacaagttgcctgaataaggttaaagtgcctgctttttgtctttagactataagtgctttgagacccaagaccatattttcctacacaggatttagatagtcaatgctgttttatatttattgaatgaaagaatgaagcaaaagctattaaattgattgaaagaaaaacatcatttatatcatacaataatttacaattttagggtgatttataactgagtaatgtttacctgcaacactaaactggttagcattttataggtgaagaaaccaaaacctaggtaggttacattcttatgccggtcatgtatgacttgctcttctcagttggttgctgattcctctattaaatggaagtccagtttgttgcctggactgaagcaaagttgagtaccttatttccttacagtgcaacagagaaatatttataattgagaaccttattaagagaaatacgtttcttttctttttctttgcttcttcttttttttttttttgagacggagtctcactctgtcgcccaggctggagtgtaatggcacagtctctgctcactgcaacctctgccccctgggtccaagtgattctcctgcctcagcctcccgagtagctgccaccatrcctggctaattttttttattttttttatttttagtagagacagggtttcactgtgttggccagactggtcttaaactcctgacctcgtgatccacccgcttcggcctcctaaaatgctgggattacagtcgtgagccaccatgcccagccaatacgtttctttttgataacttgaaatgagatttgcataaggtgaaaagtgagtggaaattgtagaagctgaatgagtaagtctttagactatagtctttaatctaactaaagactaagactaagcctagagcctgtagtctttagacctttagactgtagtatagtcttaggctataggtgctgggcaagtaagccagtattgaacgtagatttttctaagacctgttaaagcaagggatctttgtttcttaaattcttctgatataaaaatgcttcattgatcttctttgaaacactgtcctctcatttttaggtaacctaaagtttttctcaaaaaaatatgagagcatttgttttatgaatgagtactgagaaacaagatgaagtgaattgttaatcattcagcacatttgtgtcacagttagattttggagtcacccctcaaagttataatgatctgtaattagcttgaagaaattgtagattatcaagaactgattagaatctacttgtttttgcttcttttggaaatgttgggtatattctggtccccttttacacaaagtttttgaaaactttttaaaatactcttccacattagcatagtactatctttctgatcattttttctcmatttgatagaggaaaaaagttaggtcaggataacagagactgggatataaaagtcaattgggctaatctaccacttgactgattttattcttccactaaaacttccagacaagctgaaatgagagttagatgtcatctcctcaaatagttttccacatacttttgtgcttccagtgaatgaaccaacctaattttgaatccagagtgaacataaagtagcaaatatgacaatgaagtgcttttaagatgcatttatttccccagtcatattgccttcataagacttttttttttttttttgagacagggtctcgctctgtcccccaggctggagtrcagtggtatgatctctgctcactgcaacctccacatcatgggttcaagcagttcttctgcctcagcctcccgagtagctgggattataggctcccgccaccacagccagctaatttttgtatttttagtagataacggggttttgccatgttggccatgctggtcttgaacccttgacctcaagtgatctgcctgcctctgcctcctaaagtgcagggattaacaggtgtgagccaccgcacctggcccataaaaaattttgattattcatataggaaaggtaaaaataactcagccttcacctagctgccgtatatctagtcactggttttggtacttcatctgttttgataatctgtttttaatttggatcacctggatactctctatatatttttaagaactaatttttttaagatctggagaagtaacttctatagaacaggaatgactattttaggttataatacaatacttgctgtgagtcatcagcgaatctcagttttcatggttttctaaaataaactcatttaaagaatatgtaatgggaagtgtcatattttaaactaccccattttattatttatttattatttttgtaaaaacttacagactcactgttaaaacaactcaaaggagaatcttaacaatggtagaaagtaaaaattcccacccagaggaaatctcttttaaatttttgagcatcttcccatattttcccatgagtgggatcatactgtgtatgttgttcaatagcctattattttctgttaatagaatattacaaatagcaaatttctgaatgaaaaaatattagaatcaatttagaattgtttgtgaataaagtttttatttctggaaatactgaatcaactcatttgaaaccttggttataagtttcttacgtttaatggaaaggaaataatttctaagagtactartatttaatttcatggaaattatatgtgaatctcttggaaaatccaatttaaagaatgtgccgttttaaaaaatatatataatattttatataatttccagggttcttggatttccccaccaccaccatcccaaagcccrtttatgctgatggtagaaggaagtgggatgtctgtagagcttaggtcctgctctagagacttgaacaccttgtttttgtttgtttgagacagggtcttgctctgtcacccaggctagagtgcagtggtgcaatctcctcactgcaacttctgcctcctggttcaagcaattctcctacctcagtcttctgagtagctgggattacaggtacgagccaccacgcctggctaatttttgtatttttagtagagacggggtttcgccatgtgggccagcttggtctcgaactcctggcctcaagtgatctgcccaccttggcccccccaaagtgctgggattacaggtgtgatccaccatgcccagcccagttaattttttgaaataaaaaatagcagtagttgcggatatacttacatttgaatggtaattgattaaaacatggatgtatttaagttcttgaaagttttagttagtattgtaggggttttcttaaaataatacatacatttatatattagaacattatcaaactggcagtgcgtatgtgttctaatttcctgaaatacgatgtctacaattttttcccaccattttcaattttaatgaaatcacagaaccttartaagtcatatttagtcacagtgctgtgaatcatttgttaataaacatttccattgttactttataatagcctgctctctaaagtttcaaataaaagctgattttagatttttagttattaatgttctaggggtattgccaaaaaaagctacatgtcctatattctgtgccagtttcttaaattagaatcttggattgcatcctcagcgtgtcactgtagtggtattgctgggttgctatgatacagtgcttgttctataatttgtagcatgaatcctatatgagatcttactttagatttcaagtatgttagcagcagtaattagggatgttttcctctaaggaaaattatagttataaaattattatttgttagaaatgattcctgctacttcaaattatttatccttaaatgtagaggattaacaatgaacaacttgaaataacttggttatcacctcagaagtttagtttatcactgatttaatgaagaagggcaagaagaggaaggctttatgataatgagtatgtatattaagatttcagtgttctacttggtatttgaaatcttgaggagagaaatgaatagagactagattttctgggaagatgcatttgaaacagtacaagcaaaaccacattacaggggaaaactacaaattaycttactgtattgtattaaaaattcggtgaactgttcttaaaaccaaccctctgtggccatyttaataagctattgttactacctctttttcattttatgtgttggttttagtatttcatttacatgttccttgaaaatttttattaatctaatttagtattataagttataggaaacataaagacaaaactagtggattctgtgtatgtgttgtatacacattggtggtggaatgaagtttatatgattattggtcagtggcattgctgcaattgatctttaaacttttagtgtctctcagcaatgttttgggtatttgatttgaaagtattttagagaccagagcttaaaacagctctattgagatataattcatacaccatgtaattccccatttaaagtatacaattccatggcttttagtatattcacagacatgtgcaactaccacagtcaattttagaatagttttatcatctcaaaaagatatcccatgccctttaactgtcaccccctattcctttagggattccttgagtaaccattaatttactttccgtctctagatttccctattctggacatttcatgtgaatggaatattataatatgtcgtcttttgtaataggcttctttcattcactttgcataatgttttcaaggatttattcatgttgtagcatgtgttagtacttcattcctttttatggctgaataatattctattgtatggttataccatgttttatttatccattcctcactcgatggacatttcagttctttctactgtttggttatgaataatgctgctatgaacatttgtatacaagtttttgtgtggacatatgttttcatttctcttgggtatatgtaggagtggaactgctcggtcataaggtaattctgggcttagtcacttgataaattgccacagttttttccrtagtggctgcactattttacactcccacttgtggtatgtgaggattttcatcgctccacatccttaccagtacttcttattttgactttctgattatagccatcctaatggatgtgaactagtatctcttcgtggttatgatttgcatttccctaattactaatgatgtcaagtgtctttgaacatgcttattggccatttgtatatgttccttggagaaatgactctttagatcctttgcccacttttgaattgttatttgtctttttatcgagttgtaagaattctttatatgtccttgatataagccccttgtgtcttttcactttcttggtggtatcctttgaagcgcaaatgttttaaattttgagtaagtctaaattctcttttttcttgttacttgtgcttttggagtcatttctaaggatcctttcccagatatgaggctatgaagatttactctgtgttttcttctaagaattttgtaattttaacctttacatttaggtctttggccatttttagttaatttttatatagggtatgacttaaggattcaaattcattattttgtgtgtagttatcacatttatctccacaccacttgttgaaaatacttctttccccgttagatggtcttggcccttttgttgaaaattagcacatggttttatttctggattctcaattctatcccattgatctgtatgtctgttcttgtgtcagtaccacactgtcttgattacttgttttatatagtaagttttgaaatgggatagtgtgaatcttcctactttgtttttctttttcaggattgtttcggctgttattgggttatttataattgcaaagttaagtttttgatttaagatcttttgttctttcttctctagacatttatagctatatctttctctctaaacacccttaaattttggtatgttatgtcttcattttcatttgtctcaacgtattttttattttcttttaggtttcttctttgacacattagttgtttaagaatcacttaatttccaaagatttttgaatttcccaaaaatgttttaacttctcttttttaagagatggggtcagccaggtgcggtggctctcctataatgccagcactttgggaggccgaggtgggtggatcacctgaggttgggagttcaagactagcctgaccaacgtggagaaaccccgtctcttcttaaaatacaaaattagccggggtggtggcgcatgcctgtaatcccagctacttgggaggctgaggcaggagaatcgcttgaacctgggaggaggaggttgtggtgagccgagatcacgccattacactccagcctgggcaacaagagcgaaactccatttcaaaaacaaacaaaaaaagagatggggtctcgctatgttgcccaggcttgagtgcagtggccgttcacagatgctataatagtatgctgtggcctcttaactcctggcctcaaagggatccttgttgcctaagcctctcaagtaactgagcttacargtacatgctaccaaggccggccccagttttttttttttttttttgagaacagagtctcactctgttgcccaggctggagtgcagtggcatgatctcggctcactgcaacccccacctcacaggttcaagcgattctcctgccccagcctcctgagtagctgggactacaggcacacaccaccatgcctggctaatttttgtattgttagtagagatggggtttcaccatgttggccaggatggtcttgatctcctgacctcattagccacccacccctgcgtccctgagtgctgggattacaggtgggagctgccacacccsgcccccaatttttttttttttttttttttgagacggagtctcgctctctgtcaggctggagtgcagtggctccatctcagctcactgcaagctccgcctcccgggttcacgccattctcctgcctcagcctcccaagaagctgggactataggcgcccgctaccacgcctggctaatgttttgtatttttagtagagatggggtttcaccgtgttagccaggatggtctctatctcctgaccttgtgatcctcccaaagtgctgggattacaggtgtgagccaccgcgcccggctccagcccccaattttttaatgttactgatttctaacttcattcctttgkggtcagagaacatagtttgkatttctgttcttttaaaatttttgaggkttgttttattatctggtatgtggkctggtctttcctggtggatgtaccatgtgtgcttgagaatatatattctcctgttgttgggtggagtgttctatagtgagtataaattctrtagtgttccatagacacctcttaggtgtggttggtttatgtgtgttcaaagtcttcttcttgttgatcttccacctaattgttctatccattattgaaagtggggtgttgaaggcttcaactatcattgcttttgaattttctatttctctctttgtttctgtcagtttttcttcatatattttggtactgtgttaataggtgcaaatatgtttataattgttaccctcttcctgaaagactgacccttctatcattacaaaatgactctctttagatatgagataaagagtatctttatataatgatatttatatctaaataagatataargatgaaaaataatatatatccaaacagccacaagaaaactggagtggctatactaatgttaggaataacactcaaaatcctaaggaaattgaacacttgaacaaaggattcttagcaaagcaattttacttctgcacagagggtgcctccctggccagttgtcctgagagcacacctgaacaaaggggcacgagagcctttattcctgatgcaagtcctgcccctgtaccctttccccattggccggggtcgggtcgtacaatctaaactaatcctggttggctaaacattgtattttttttagatagggtgggcacgtaaaggaaagtggagagaataggggaaggggtgtctgtaatgagccataaagttagtcctctttccaaataaggaaaggaatgtgagctggtactgataacacttggtagtgtggcgtgcctgggcatttaacaaaggcaagaagggaaaaggggaaaaaaggagaagaatggagggggggtaactacgaattaaaaaataaaagattgatcagattatttgaagagaaacctcatcatatcccacactaatatcaaacaaaacagactttaaaaatatatacagtttgatatatatatctatttaagatatgagacaaaagttttctgtatatgtcaaacatttac[450 bp omitted]gaactcctgaccttgtgatccacccacctgtgcctcccaagtgctgggattacaggcgtgagtcaccatgcccctccggttaatccatttacacttaatgtagttgttcatatagttggatttatgcctgccattttactttccgttttctctgtccctcatgtctttttttgttctctattgtattctttttctgttttctttagtattaagtgaatattttctaatgcagcatttaaacttgtgtaatgattatttttcactacatatttttgagagttttttttttttagtggctgcccttgggtttattatatgcattttaacttattagaatcagcttcaaatttatacaagctttgttctagtgagatgtagaatcattattcctatatgcctctgtttcctttcctccttttttgtgatattagtgttatataatatctgttaatgttacaaccccgagaatatattgttataattattactttaccatcagtagttatttctttaatgcagcacaactttcctcccacctcctcctttgtgctgttattagcaaatacattacatttctatgtatcaaccgtccaayggtacattatataatattattttgtgtaatggctgttaaaatcaggtaagagaagaaagaaaaataggcacttataatgtactttatagttacataattatctttactggtgctctatgtttttaaatacagatttcaagctatcattggtggtcatatgcttgagcctgaaggaaatcctttagtgtttctataaggtagaacagctagcaaaaaattcttcgtttttatttatttgggaacgtcttcattttgccttcatattttaaagatttaaatacttctcgagatacggtctcgctctagtgcccaggctggagtgcagtggcgtgatcttggctcactgcaacctctgcctcctgagctcaagttatcttcttgcctcagcctccaagaagttatcttcttgcctcagaatatctgccaccacacctggctaatttttgtatttttttgtagagacaggttctcaactgttgcccaggctgatcttgaactcctgagtccacctgcctcagctcccaagccttcatttttgaaagatcgttttattggatataggatttttggtgacaagtttttgtttttctttgagcactttgaatatgttattccactgttttctggcctcagttgtttttgctaagaagtcaattgttatcttagcccttgaaagtaactagttgtttttctcttggtgctttcaaggttttctccttgtctttgactttcatcatttttactgtgatgtttatttgtggatcttgttgagtttatccttcttggagtttcttgtgttaggtttatgttactcaatacattatgttggtacacttttttttttttttttgagatggagtcttgctctgttgcccaggctggagtatagtggcatgatcttggctcactgcaacctgtrcctctcaggttcaagtgattctcctgcctcaccctcttgagtagttgggactacaggcacctgccaccatgcccggctaatttttgtatttttagtagagacagagttttgctatgctggctaggctggtctcaaactcctgacctcaggtgatcctcccgcctcggcctcccaaagtgctgggattacaggcctgagccaccgcacctggctgtgtgttggtacacttaatrgtgtcctataggtctctgaagttctgtttatttttcttcattcttttttctttctgttcttcagattgcataatttctgttgatgtattttcaagttccccaattctttctaatgccagttctcgtctcctcatgggtccctttagtttattttgctattatgtttttcaactccaggattttcattttattccttttttctttttgtaaattctatctctttatgatattctctgtttgatgtaacattgtcatcatacctttcttctttttttatggtgaaaagatatatatatatatttagccagctagactcagtttagatgatctcgattttgttggcaacatccaaagcattgtaatcaggagccagtcaaacatatgccttcttctctccatcaggccgaatcagggtgttgaccttggccacattggtgtcatagagcttcttcacagcctgtttaatctggtgcttgttggctttaacatccacaatgaacacaagtgtattgttgtcttctatcttcttcatggcagactcagtggtcagcggaaacttgatgatagcatagtggtcaagtttgtttctcctgggggcgctcttccgaggatatttgggctgcctccggagtcgcagtgtcttgggccgccggaaggtgggtgacgtgcggatcttcttttttttgtggctgtggacacctttcaacattgcctttttggcctttaaagccttcgctttgtcttcggctttagaaggygcaggagcttccttcttcgctttyggcgccatcttgtgaaaagcccttctttacttctttaatcatagtttagttctttgaacatatataatgactactttaaagtcatatattctgttaaatccaacatacggtcactctcacaggcaggttctacaaccttctttttttctggcacatgggttatatttttcctgtttctttgtgcgttttgttattaactggacatttaaaataacaggtatccaaccttttggcttccctgggccacattggaagaattgtcttgggccacacataaaatacactaacactaacgatagctgacgagctaaaagaaaaaaaaaagttcatgcataatttttgtgatacccaccaccacagataagcaaaaaagtcctcacatcctaagggttggactcggctgttttaaataatatattgtagcaactcttggtaccaaccttgttattgtcacttgtttgtttagtgactgggtgtagttttcccccatactttgtaaagcctctgatcttgttcctcagagaggtgcagctttggatatgcccaggcaccttgggatgacagtggttttggcagggttctctttgtcttttcctgaccatactcccagctgttaagttccattgattttcagctgattgctcaattgttttcaataatgctttggggcacacattgttctacagactaatccaatcaaatccaggctcctttgaaggaatagttcccaaggtcagtatgtgatatttgttctaacatcaggagggctccacactgctgggtttttttttttgtctctcctgaaaaataactagcctacagtttagtctgtatcctcattgaatttacagatctccccattatctttcaccaaaacctccactgtttttaagagtacccttaggcttgaacattttttttaatgccctgttgtaaagaagtcagttgttttgggaaaagatgaagagctaactgttttatggcctacttctcccccatcccccacaaaatctctggagtcggggctcagagctgggagtggggacaattgtatgcttctttctgaaaccctgctttagaagctgagcagtttggggaagtgggagcagcagcccgaggtcttctttttggcttgcctcttccagtgtggaatcacaactttataggccagaacaaaggtgattgaggccccagttatttttttagcagtgttgcacaaaaggtagagcctctgccccatgcgtggaggttgggcagaagaaaggaggcctgcctttcagttgcacttgtctagaacttatcctcagcaacaataagttgctgtggaaaggatgagaaatgctgataggtcctactccttacctaaagatgtctgggagctagaagtagagraagagccctgtgttctcctctgcgtctctttgaagtagggtttctacatagctgagccaagggggaaggagctctcttgcttaaaatacagtcatgtgctgcataacgatgttttggtccatgacgtggtatataggatggtggtcccaaaatattacagtggagctgaaaaattcctgtcccctagtgatgtagctttagttcatagaacaaggcatgactcacatgtttatggtgatgccagtgtaaaaaaaccagctgcactatcatataaaagtatatatagctgccaggcatggtggctcaagcctatcccagcacttcgggaggctgaggcaggcggatcacgaggtcgggagatcgagaccatcctggctaacacggtgaaaccccgtctctactaaaaatacgaaaaattagtcgggtgtggtggcaggcgcctgtagtcccagctgctcccggaggctgaggcagaagaatggcatgaacccgggaggcggaggcagtgagccatgatcgtgccactgcactccagcctgggcgacagagcaagactccgtctcaaaaaaaaaaaaagtatatatagcatatacaattatgtacaatacataatacttgataataaatgttactggcttatgtatttattatactatttttatcattattttagagtgtgctccttctacttattacaaaaaaaaaagttagctgtaaagcagcctcaggcaggcccttcaggaggtattctagaagatgtggagatgagacagtgacgtagatgatcctgaccctgggtaggcctaagccatctgtgtttgtgtcttagtttttaacaaaaaagtttaaaaagttaaaaagtctgaaaaatagaaaaaagcttatagactactgatagaaaaaatatttttatacagctgtacagtgtgtgttttaagctatgttattgcaaaagagtaaaaaagttaaaattttaaagtttatataaagttacagtaagctaaggtcattattggagaaagaaaatgttttaaataaatttagggtagcctaaatataccgtttataaagtctatagtagtgtacagtaatgtcctaggccttcacattcactcaccacttactcatccagagcaacttccagtcttgtaagctctattcatgttaagtgtcctagacagatgtgccatttttaaatcttttataccatattttttattgcacctttctatatttggatacacttacagttgcctatagtatttagtatagtagcatgctgacagttttgtagcctaggagcagtaggctctaccatatagcctaggcgtgtagtaggctgtgccatctaagtttgtgtaawacattctgatattcacacaatgatgaaactgcctgaggatgcattctcagaatgtatttctgtcattttaagtgatgcatgactgtaccactagctcttggtattctaactgaattttcatagatattcctgaatagatatttttttgctgtttgcccttaggaccatttcagaggctataaaaatggctgttttaaacataacttctatcagtttccctggtgagtaggcctgtggaacttctcaccttgtcttgtcagaagttgatctccctctggactagaattttagctttttttgtagtaataattagtatcttagccttatttaggatttcatagctttcaggtacataatcatgccaataaatctgaaaacctaagaggagatgggagaattccttgaaataaacagctttctgaaactgacacaagaagaaacaaaaatctgaatagttatgtatctctttgactgattcctaatttaaaaccccaacagggaaattacaagaaaattatagaccaatatcccttatgaacatagatttttttaaagttgtatacaaaatattaacaaattgaatttgaaatatataaatagaatgagatattttgataatgtgggatttatgccaggaatgcaaggctggttttacattaaaaaaatgatttgttacataaatagaataaaataaaaattatcacttcaacataaatagagaaaatagaaagttccttctctgtatagttgccttctgtttagtactttcctatgcaaatcctagccacctcagtagccctatctctagtctttattttgctcattaaatctgttgttcttttagggtttctttttcctgtgctttctctctctggagagccctagcagatagggagctggtgcgattgtggggctttgttttccttcccacagcgatcacagtcctgtactgcctgttttctagcatctgaaaacaattgttttatatattttgttcagtttttagtagtttacagtggaaaggatagtcttctggaagaagtcttgcccacactttttgtcattcttacccaataggtataaagtgatgtatgacatttcatgtataaattcgtgtatactgtttatacatacttacatttttttggttaccagtgtggttgaatatcttttcatatacttatcggtcatttatgtttcatgtgacctttttttcctatagattttgggtttttttcttaatgatttgtaggtgttcttttgtacattctgtataccaatttcttgtccacatttaattttttagttctttcggaactaatttttgtgtgtgaaggaaggatctaattttaatttttttcatatgagtagctggaataatttattgaactttaaatatttcctactgactttaaaaaaaaaaacaccaaccgtattatatactaaccttttgtatgtgtacactggcatgtttctaagtgccttatttttttttcctcagtggtctgtgaattcctgcacaacaccatgtggttttaattactaaatgtggtaagatgactcttcccttcttcatgttaaaaatcatcttggctattcttggcactttatttttccagacgcatttttaagaacaactctaatggttccaccaaaataccctattgagaatttaatctgaattgtattccttgtatagattcmttgggggaaaacattgattcttctcatccatgaatataatatatctccatttatttatctctttcatacatttcaagaatgttttataattatattcataagagctttgcttgtttttcgttagacttctcagattcattgcccttggaacacagttaccatattatgagggagctcagaccgcatggagaggctatatgttggaggttctggtactagccccagctagtctgtcagccaaaagccagcaactaccagacataagagttatttagccttctcagaattccatcctctagttttctagtcctttagctgaggccttagacatcatggagcagagataagctatccctgttctatcctttctgaatccctgacacaaagaaattgagaaaggtagtttttttttgttgttgttgtttttttaagatgggttcttaaaaaacccatcttaaactccagtactgttgtccaggctggagtgcatgatcacagcttattgcagcctcaaccctctggcctcaagcagtcctcccacttcagcctccaagtagctggaactacaggtgtgtgccaccaagcctatttttttttttttttttgagatggtgtctcgctgtgatgcccagggtgaagtgcagtggctcaagtctcagctcactgcaaactccacttcccgggttcaagcgattatcctgcctcagtctcctgagtagctgggactacaggcacgtgccaccatgcctggctaatttttttttttgtattttagtagagatgaggtttcaccatattggccaggttggtctcaactcctgacttgaagtgatccgcccacctcagcctcccgaagtgttgggattacaggcatgagccactgtgcccagccaagtgtagctaaattttaaatttttcgtagagacaagttcttgctgtgttgcccaagttggtcttcaactcctgggctcaagcagttctcctgcctcagcctcccaaagtgttgggattacaggcataagccaccacgcccagcctaataattgttttaagccacagaattttgggataatttgttactaagaatagaaaatgaataccccaggcatcattatgcttatgttatgatttggcttgttttataacttttcctatgggaacacataatcagaatattctaatatagtatatggggaatagtttctcatcctgaattaataaattagtatttattactgtcttatgagcttggagaatttgtatttgtattatgtatgatttttaaaaacatacctgagtttgtaaggcagaggaatagactcagacattgaaaattcatcatgaacactatgcttcttgggaaactggacttactgtctattgagagtgtactaacatccctgtgtggttgagaatgaggtttcattttccatgacatttctgtagtcagatatatattacacagagttataacacccaaacttgtcttaaagacctcttaatttagttgtacagtcttcctaagtaggtttcataaatcgacattaaagaacataatgtaaaacttctttgcaacattttcctaaagattctaatttacttcgaaaaattctcacaaagtttgctaatattgaatgagtcattgaaataagccaggctatatactcaactatgtagattttattatttctctgatattttaattttatgtaaatatgaagtatacatacaagtacatctcattgtattgtgcttcactgtattgcatttcccagatattgtgtgttttatttttttaaaacaaatggaaggtttttggcaaacctgcattgagcaagtctgttggtcccatttttccaatagcatgtgctcgctttgtgtctctgtgtcacattttggagattctctcaatatatatctgttatgatcgcctccaattagtgatctttaatgttactattgtaattgttttggggcatcatgaaccatagccatataagatgtcacacttaatcagtaggtgttgtttgtgttctgatggctccaccaactggccatttcctggtctttcttcctctccttgggcctccctattccctgagacacaacaaaattgagattaggccaattaaatacctctgcaatggctgctaagtgttgaagtgaaaggaagagtctcacacctcactttaaatcagaagctagaaatgattaagcttagtgaggaaggcatgttgaaagctgtgattggccaaaagctaggcctcttgtaccaaacagccaagttgtgaatgcaaaggaagagctcttgaaggacattaaaagtgctactccagtgaccgcatgaatgataggaaagcaaaacagccttattgttgatttggagaaagtttgagtggtctgaatagaagatcaaacagccataacatttccttaagccaaagcctaatccagaacatgtctaaaaatgcccttcctgaacctctgtacttaattgatagttgactagttacagagttctagactggcattagaattctaataggatagccccattatcttctggcatgacttctgctgataagaaattccatggatatttaacctttgtgggtgacttttttttttttttttttttttttttaatctgaaagcttttattcttctctcctgggcatctgaattttcagtaatgtgctaaattatccctttgggatcatgtatttctctgtatttggttttatgtcatgttgcagtctctggcgatcctttattttccattaatatgtatggataaacaaaaaattactgtaagagttggttggggcttattgattatctggttttgtttagagtaattggttagggatctagttacatgctggaatgtaggaacctcctctggcactgttcagtttctttagggaagaaccttctaattttcttttgtctgaagcgtgaatgcttgactgtcttttggagtgggatggtaractcttcagcaagtccagacttttatttaatcccccatttcagttcatgtcttaatcctttccactgtttcactagatatttcttaatcttgaactaatctgaagttctgtaggacccttgcctgtattccccctttttattctaggacttgacttcctcttagttttgccagttaccacttctctacctactttgagttttcgctgaaatttgttgaagtctcttgcctatgggcctatttttctgttctctgttattgtgggtttttatctcttttttttggtggggggtctactctcattttagagggaaggggagaaaaacaaaattgccatttttaactgatatgtactgtgaatctctaatgggtaacgatttagaatacagcttttaaaggaacatttgatatttcaaaaacagtattctcatacttgttcaccttacattctaggtggtttaaatcccagcttcagtacaaatttgctttatgatcttgggcatgctgtgtagtgtgggatcctgaagtacttcacatactgtaaagcagtggttttcaaactcgttttcactgcagactatagtgagaaacacattttacttcataacttacatacttccatgacataatatccttacgtgcaatacactctgattttttttttttaaactcttgattgtgacccactaacttgatcttactgcccaccaatggcgtgcaacctacactttgaaaaacagtatactagagcagtatttcttaaaagtgtgagccagggccaggttcagtggcttacgcctgtaatcccagcattttaggaggccgaggcaggcggatcacaaagtcaggagttcgagaccagtctggccaagatggtgaaacctcgtctctactaaaaatacaaaaattagctgagtgtggtggtgggcgcctgtagtcccagctacttgggaggctgaggcaggagaatcgcttgaacctgggaggcagaggttgcagtgagctgagactcaatctcaaaaaaaaaattaaaaaaaaaagtgtgagccaaatatattttcaagttgagtattgaaaaagacgtaagaatttgggaaaaacctagcggggcttttgtgagttttaaaaggtatgttaataatcctccaaagatgaaattgtgcctttccctagagttatcttgagtcacccttggcccttggcttgaggccatgcagggatttttacagtgttgagaattatctttagtgagatcaagtggcagtcataataaattgaagtacagtttaaaatgtgctttaaaaacacatcttttagtcaaatttaaattaattatgtatttagcaaagcaaggcatatctgttttttttttaaggtaattcctagattgtgcagtttgttgtacctttcataatattcatgcagagctttttatattgtggatttagtgatattttctagaagaatgctgcttttaaatttttttattttttatttttggaagaatgcttttagtaaatccttagctctgatgctgaagagatgactacaagttgatactgcaggttattacatatattaagtgcatagtcaaatttccttgaggcaacaaaaagacttaaggcatttgaaattgttaaatatggtataccatgatagtagatagtagtctgaattgctccttggttaatacttgggaagatcaaaatacagttggccctccatatctgtgggttccacatctgtggattcaaccaaccttggatcaaaaatactccagggaagggaggaagaatctatacagactatgtagagacttttttttcaggtcattattccttaaataatataacaactgtttacatagcatttacattgtattaggtataagtaatatagacatgatttaaagtatacaggaggctatgcataggttaatgcaaatactagaccattttacataagggacttgagcatcctcagatttttgtatctgggggagtccaggaacttgtccccatggataatgcagatcaactgtatacttataaatttatgtgtaggacattctcttcatttaaatagaggtcactaggaccttaaatactcatctcttatttactcatttatttatacattttggaagaaatcagcatccatttgaaacagatatatgtcatcagttcaagaaaacctggttaaaattgccccaacaaaaacttggacctcttgtaataattaaattcagagtgactgagcaaactactgtgttgtagtactcagggcatgatccaaaaggtaccttgtcagccacaactctagttgctgatgatgcagtgctataaggtgttgtgaatttttcctgtgaacttgtttgtttctaaagatgttttcatttttaaacctttaagtgaaattctgatagaaaatatcagcatctcttgcagggagaatgccaggtgagcaagttgtcaccgtaggaatcagaatggacgttatcatccgtagtgagaatggcaaatggataatcaacatcagcccaattgccagactaaaacatcattatgacagacttcatttgcaagaattcttaaaacggagaagctgaagaataaagtggccagtgcagatattgtctgtgctttttacatttaacagatttattatgtgttctttttgttttcttttcttttctttttttttttttttgagacggagttttgctcttgttgcccaggctggagtgcaatggcgcgatctcggctcactgcaccctctgcctcccgggttcaagcgattctcctgtctcagtctcccgagtagctgggattacaggtgtgcgccactacacccggctaatttttttgtatttttagtagaggtggggtttcaccatgttggccaggctggtctcaaattcctgacctcaggtgatccrcccgtctcagccttccaaagtgctgggattacaggcatgagccactgtgcccagcctatgtgttctttttcttacagattgtttttttttttttttttttwattgatcattcttgggtgtttctcgcagagggggatttggcagggtcacaggacaatagtggagggaaggtcagcagataagtgaacaaaggtctctggttttcctaggcagaggaccctgcggccttccgcagtgtttgtgtccctgggtacttgagattagggagtggtgatgactcttaaygagcatgctgccttcaagcatctgtttaacaaatcacatcttgcaccacccttaatccattcaaccctgagtggacacagcacatgtttcagagagcacagggttgggggtaaggtcacagatcaacgggatcccaaggcagaagaatgtttcttagtacagaacaaaatcaaaagtctcccatgtctacctctttctacacagacatggcaaccatccgattnnnnnnnnnnnnnnnnnnnnnnnnnnnnnnnnnnnnnnnnnnnnnnnnnnnnnnnnnnnnnnnnnnnnnnnnnnnnnnnnnnnnnnnnnnnnnnnnnnnnnnnnnnnnnnnnnnnnnnnnnnnnnnnnnnnnnnnnnnnnnnnnnnnnnnnnnnnnnnnnnnnnnnnnnnnnnnnnnnnnnnnnnnnnnnnnnnnnnnnnnnnnnnnnnnnnnnnnnnnnnnnnnnnnnnnnnnnnnnnnnnnnnnnnnnnnnnnnnnnnnnnnnnnnnnnnnnnnnnnnnnnnnnnnnnnnnnnnnnnnnnnnnnnnnnnnnnnnnnnnnnnnnnnnnnnnnnnnnnnnnnnnnnnnnnnnnnnnnnnnnnnnnnnnnnnnnnnnnnnnnnnnnnnnnnnnnnnnnnnnnnnnnnnnnnnnnnnnnnnnnnnnnnnnnnnnnnnnnnnnnnnnnnnnnnnnnnnnnnnnnnnnnnnnnnnnnnnnnnnnnnnnnnnnnnnnnnnnnnnnnnnnnnnnnnnnnnnnnnnnnnnnnnnnnnnnnnnnnnnnnnnnnnnnnnnnnnnnnnnnnnnnnnnnnnnnnnnnnnnnnnnnnnnnnnnnnnnnnnnnnnnnnnnnnnnnnnnnnnnnnnnnnnnnnnnnnnnnnnnnnnnnnnnnnnnnnnnnnnnnnnnnnnnnnnnnnnnnnnnnnnnnnnnnnnnnnnnnnnnnnnnnnnnnnnnnnnnnnnnnnnnnnnnnnnnnnnnnnnnnnnnnnnnnnnnnnnnnnnnnnnnnnnnnnnnnnnnnnnnnnnnnnnnnnnnnnnnnnnnnnnnnnnnnnnnnnnnnnnnnnnnnnnnnnnnnnnnnnnnnnnnnnnnnnnnnnnnnnnnnnnnnnnnnnnnnnnnnnnnnnnnnnnnnnnnnnnnnnnnnnnnnnnnnnnnnnnnnnnnnnnnnnnnnnnnnnnnnnnnnnnnnnnnnnnnnnnnnnnnnnnnnnnnnnnnnnnnnnnnnnnnnnnnnnnnnnnnnnnnnnnnnnnnnnnnnnnnnnnnnnnnnnnnnnnnnnnnnnnnnnnnnnnnnnnnnnnnnnnnnnnnnnnnnnnnnnnnnnnnnnnnnnnnnnnnnnnnnnnnnnnnnnnnnnnnnnnnnnnnnnnnnnnnnnnnnnnnnnnnnnnnnnnnnnnnnnnnnnnnnnnnnnnnnnnnnnnnnnnnnnnnnnnnnnnnnnnnnnnnnnnnnnnnnnnnnnnnnnnnnnnnnnnnnnnnnnnnnnnnnnnnnnnnnnnnnnnnnnnnnnnnnnnnnnnnnnnnnnnnnnnnnnnnnnnnnnnnnnnnnnnnnnnnnnnnnnnnnnnnnnnnnnnnnnnnnnnnnnnnnnnnnnnnnnnnnnnnnnnnnnnnnnnnnnnnnnnnnnnnnnnnnnnnnnnnnnnnnnnnnnnnnnnnnnnnnnnnnnnnnnnnnnnnnnnnnnnnnnnnnnnnnnnnnnnnnnnnnnnnnnnnnnnnnnnnnnnnnnnnnnnnnnnnnnnnnnnnnnnnnnnnnnnnnnnnnnnnnnnnnnnnnnnnnnnnnnnnnnnnnnnnnnnnnnnnnnnnnnnnnnnnnnnnnnnnnnnnnnnnnnnnnnnnnnnnnnnnnnnnnnnnnnnnnnnnnnnnnnnnnnnnnnnnnnnnnnnnnnnnnnnnnnnnnnnnnnnnnnnnnnnnnnnnnnnnnnnnnnnnnnnnnnnnnnnnnnnnnnnnnnnnnnnnnnnnnnnnnnnnnnnnnnnnnnnnnnnnnnnnnnnnnnnnnnnnnnnnnnnnnnnnnnnnnnnnnnnnnnnnnnnnnnnnnnnnnnnnnnnnnnnnnnnnnnnnnnnnnnnnnnnnnnnnnnnnnnnnnnnnnnnnnnnnnnnnnnnnnnnnnnnnnnnnnnnnnnnnnnnnnnnnnnnnnnnnnnnnnnnnnnnnnnnnnnnnnnnnnnnnnnnnnnnnnnnnnnnnnnnnnnnnnnnnnnnnnnnnnnnnnnnnnnnnnnnnnnnnnnnnnnnnnnnnnnnnnnnnnnnnnnnnnnnnnnnnnnnnnnnnnnnnnnnnnnnnnnnnnnnnnnnnnnnnnnnnnnnnnnnnnnnnnnnnnnnnnnnnnnnnnnnnnnnnnnnnnnnnnnnnnnnnnnnnnnnnnnnnnnnnnnnnnnnnnnnnnnnnnnnnnnnnnnnnnnnnnnnnnnnnnnnnnnnnnnnnnnnnnnnnnnnnnnnnnnnnnnnnnnnnnnnnnnnnnnnnnnnnnnnnnnnnnnnnnnnnnnnnnnnnnnnnnnnnnnnnnnnnnnnnnnnnnnnnnnnnnnnnnnnnnnnnnnnnnnnnnnnnnnnnnnnnnnnnnnnnnnnnnnnnnnnnnnnnnnnnnnnnnnnnnnnnnnnnnnnnnnnnnnnnnnnnnnnnnnnnnnnnnnnnnnnnnnnnnnnnnnnnnnnnnnnnnnnnnnnnnnnnnnnnnnnnnnnnnnnnnnnnnnnnnnnnnnnnnnnnnnnnnnn[132 bp omitted]gagacggtgtttcaccgtgttagccaggatggtctcgatctcctgacctcgtgatctgcccgcctcagcctcccaaagtgctgggattacaggcgtgagccactgtgcccagccctcatttcatttttaatttttctgtttatatttaatcttgtaagcactcttgaattacttttgatyccagattgtgtggagaatagtcagtatatatgtggtaaatatatactgtggttgtaccttttccattttgcctgatagcattactttctgtgttctgtatctggccttctcaacttgcttctaatcttttgaagacaggaaatcatctctcagaattcgcttcaaaggattgtgtgaaattagtgcatataaaacacttagaattgtctttggaatgaagtactaacgttagcagtagtactgtattttaataygtagcacagcagactgctcaatagacattatatacttaatgggtagggtttattaggaaaagatctttctatatcataatacctaaaaataatcaagaattggaaacttctgttttaacccagagccaatggagttgtaacattaactgcttctaaatacttctaatgtttgggaaaattcagatgtgacctatcccacccaagcattatgtaatgctgggatatagttctgggggagaaaaaacaaaaacaaatttaaatgcatcttttaggctaagaaatggattactgaatggataagctatgaaaaacattaatttctttctagaggagacccaggagttaggtgcccagagaaagtcttttttaaaaaatgtgtaacatggggctgggcacggtggctcacgcctgtaatcccagcactttgggaggccgaggtgggtggatcacgaggtcaggagatcgagaccagcctgaccaacatggtgaaaccccgtctctactaaaaatagaaaaattagccgggtgtggtggtgagygcctgtaatcccagctacttgggaggctgaggcaggagaatctcttgaacctgggaggcggagtttgcagtgagcagagattgtaccactgcactccagcctgggcgacagaacaagactccatctcaaaaaaaaaaaaaatgtgtaacatgttcttaaacctactacgattatgcttaacgatggggctatgtaatgagaaattcatcattagacaaatttgtcattgtgcraacatcatagagtatacttccacaaacttaaatggtatagtttactacacatctaggctgtgtacaaacctgtacagcatgttactgttctgaatactgtaggcagtttgcaaaaggaagtgtatgtgtgtctaaacaagaaaaggtacagtaaaaataggtttatatgggaccaccatcacataagcagtctgttgttgacaaaactttgttatgtggcgcatgactgtattttccaatcctgaaagtcattttgtgtcttcttttttgctggccacaggctacttagcctgtagtgttagaaaaacatactttccatttgtatttcaccttgaaatatatgcactcatcttcatgattgttatctcaatccatttaattctaccatcaaggtagattgttgataaaaatggtcattatgattaattttttttttttttttgagacagagtcttcttgctctgtmccccaggctggagtgcagtggcacaatctgggctcactgcaagctctgcctcccgggttcacgccattcttctgcctcagcctcctgagtagctgggactacaggtgcctgccaccatgcccggctaattttttgttacttttagtagagacagggtttcaccatgttagctaggatggtcttgatcttcttaccttgtgatccacccacctyggcctcccaaagtgctgggattacaagcatgagccaccgcacctggcatgattaattcttaaacatagccatgttgtaataattcattatttatgtcgctgttgatatccagcaccaattttgaacttctccttgttcagtagactgtatttcagtgcagtatcttattcttcaaattcagagttttttcaagcatcaaataaatatttattaactccttatataccctaccctagataaaaaagaaataaaaaggaaaccctgctcagtgaataatccttccccttgaggagcctgaaatcttttggtggttgatgaaagaaacatctgttgaatataggcctaaagataatgggtactcaaatacgtaattgaagttgtgaacactatagatcatgagagatgggagagatcattgtatcctgacctacctaagggaaattttgtggagaaygtgagattaagtttgttcttaaagggcaagtaggatatggaaagataggggaggaaatctagtgaagtatttcaggtagggaaaagactttgaacaaagacacggccttcagagaataagagggctggtttcattcacattgaggaggtggtagtgggaggaaggagagaataggactggcggtataaggtgatcacataattgaagtgggatcttgtgtgagtttgtattactattagcgttagggaaaaagggctaaaatatatcttaaaactcttttagaacgcagcctctcaagatatggcaactgtttcaccaagtcatcattatggaatttatattaattataaagatatatattataaaataaagccatatattagggatatagatatctttgaaaatagataactgtataaagatattactgaataactgagagaactatggggatttcctgtacactatggattgagaaggattcttatagcccacatagtcaacatgtatctcgtttagtgtgtagtacatacataagcagaggtgtccatcttctaattttcaaactaagtaccaatatcaagcagacatctttttgttagttgaaataaattattagcagacatcatttattaatgaaaattaaatgcacataaccattttaactttaagggtaaaaagccccagaagatttaagaaaagggccattcaagatacaactgattttacagagaagaagcagattctgcttagaatgactaatggccattttgggattaaaaaaaggtagtaaacataagactgctggttatgtgtagcatgtatgttggctagtggttcattttcacccccaatagaatgaattttaattctgggataaagataactgtttagcatattacttagtattaaaaatagttgcaaattcaatgttttttttttttttaaggatacataaaaatattcccacttaagaacagttccataaaaggtgatcctgaatcagggtgaggtggctcacacctgtaatcccagcactttgggaggccgaggcaggcggatcatttgaggtcaggagtttgaggccaggctggccaacatggtgaaacttcatctctattaaaaaaaatacaaaaattagctgggcgtggtggtgcaggcctgtaatcccagctacytgggaggctgaggcaggaaaattgcatgaacctgggaggcaggggttgcagtgagccaagatcgygccaccacactctagcctgggcagtagagtgagactccgtctcaaaaaaaaagtgaccctgaatcaaaaactttaccaaattggtagtaaaaaatgtcatatatgtcaatattacatggattctgaatgccaatcttaggcttatagactttaaccttcataaagcagagagtcattattgattctggaacaggaaatgttaatacaagttctttgtaagtgtggagctatcttattttactggcatagccacaaatgaactgcagcaaattcaagtcttcatatttttacttcaaaaatcatgtgacttttgctgttctttgtaatatatccacatttgttttattgtaaaattatttaataataattgatcaatgaaaagaatgtgccttatgtcttgtgactttgtgtgagcatgcttagaatacctgacctactacggttcagcagtaccttatctaaatcagcttttttaaggacagcaacttgaatataattgaaaggtaattttactagcttcctgccctggagtaattaygaagcataggcattcttgattaggttatcatctttatgaagatttctgcctgtatctttatataaagtatgtactggttttgaatagaggcatagttttgtatattatgagataaatatcagagttgaatatgatttttaaaatttactttcagaagttcagtaaacttaagtgattgaactaattgaattccttgtttatagaatgaaagttcggaagtgaagttttatggttttgaaggttagaaacaaaaggatttaacatttgttagaatcaaatcaatacagtgtgtccatatttttgtaataagtagaatataaaacaataaactttttaaatcgagacttgagtctcactctgtggcccaggctggagtgcagtggcgctatctcggctcattgcaacccccacctcctgcgttccagtgattctccttcctcagccttcccagtagctgggattacaggcgcccgccaccacgtttggctaatttttgtatttttagtagagatggggtttcaccatttggctaggctggtcttgaactcctgacctcaagtcatccgcctgcctcagccttccaaagtgctgggattacaggcatgagccaccacaccggcccattttttgagtgcctattatatgccaggcattgtattagatactagaaagagaaagagaagtagagagagagaaagacagagataattagataagtaaaacttggtttctgcattgattgattgagatgttgtctctgttgcccaggctggaatgcagtggtgcgatttcggctcgctgcaaccccagcctcctgggttcaagcaattctcttacctcagcctctggagtagctgggattacaggcatgcgccaccatgcccggataatttttgtatttttagtagagacggggttttgccatgttggcaaggctggtctygaactcatgacctcaagtgatctgcccgccttggcctcccaaaatgctgggattacagatgtgagccactgtgcctagccgttggttcctgcttttagttgaggggtgctgagtatgtaaaatataattgctgtaaagcacagtaaatactataacagagatatgcacctaaaacacatttgggtaaaagtggataaaccaaccaatttagcttcagtaccataaggaaagcttctgaaaactgtactccagcccaggcgacagagcaagagtttgtctcaaaaaaataaaaattaaaaaaaaagaagggacttacgctgaaactttgtaagtaggtagtgttcccagggtgggaatgtgggaagaagggcattccagacagaggaaacattgtgtaatcttcagggaactacagagagtatggtttaaccaaaatgaagaggcatgttggaaagggttgagagatgactcttgacagtagacagctgtactttgtatacagccgagaggagtttgaactttattatttaattattggagtatcattgaaaaacatggaacttgaacacaccgattctcattttggcaagattttgaggttgtttggagggtaagtcaggagtggtaatggttatgggaccagataagaggagcaattagcatatcattgctgtagtccagatgaggcatggtgagagtctgaaatggcagcgggaatgacaagaatagatttcaaatatgttaaagacgccgaatcagtaacatttaatgattagctggntatggtggcacataatctccactactctggaggctgaggcaggaggatcacatgagcctaggagtttgagtctatcttgggcaatgtagcaagaccatatttctttaaaaaawtttttttaatgattgattgtgagtaatgagggagagagaagagtccagtataaatccctgaatgatggggttatagatgggcacatttctcactagatttttggaagaagttttacatatgtgaatagcttctacaaaattaataaatatataaaagtaacttctgagtaggttatttctaagtttttctttatttttatttatagatgccacttcaaatgaacaacaagagcttttctgtcagaagttgcagcagtgttgtatactgtttgatttcatggactctgtttcagacttgaagagcaaagaaattaaaagagcaacactgaatgaactggttgagtatgtttcaactaatcgtggtgtaattgttgaatcagcgtattctgatatagtaaaaatggtaagcctctagaattatgttcctcagatttatgtaaatttaagatctgaggtataataatgaattgagactgattttaaataaatgtacaataattaatacatcccccaaattttagaaaatagttcataccccatccattccaatgataccatcattgcatatacaagtttgggaattgagagtcatagtggctggtggcttccatattggatagtgcagatctagagcttaagagaagggtttaggcctgggattatacagattgataggtaattaatgtcatggaggtgaatagttactgagaacttttatttttatttatttatttttgagacggagtcttgctgtgtagcccaggctggagtgcagtggtgcgatcttggctcactgcaacctctgcctcccagtttcaagcagttctctgcctcagcctcccgagtagctgggattacaggtgcccacgaccacgcccagccaatttttgtatcttcagtagagatggggtttcaccatcttggccaggctggtcttgaactcctgacaygktgatcsacctgccgcggcctctgaaaatgctgggattataggcgtgagccaccgcacccggccattactaagaacttgtaaaggggaaagggaagaccawtgaaagactagggatctccacatttaagcagtgggtaagggagtcaggtataacgctttaattgaaagtcaggatctttaagaagttataatatctgatgtggaaaaaaaactgcagccaactttattgaagtaaggttgtttaggatgcttgctgtttattaataattcaaccttattttctatcaaacagtatgattttgtttagtatttgtgattttttaattttattttattgtatactaacaaaatataaaaattcaggccagtgcagtggctcgcttatgcttgtaaaccccagcactttgggaggctgaggtgggagaatcacttgaggccaagagttcaagaccagcctggccagcatagcaaggacccatctctacaaaaagtactaaaaataaaaataaaaatattagctaggcatggtggcatgagcctttagtaaaggcccagctactcaggaggctgaggtgagaggatcgcttgagcccaggagttcaagactgaagtgagccatgatcaccactgcattccagcctgggttgacagaggaacaccttgtctcaaaaaaaaaaaaagtaaaaaaatccagttggactaattagagagtcgctgagtacataatttaaacttagagtattgaagctaaaagcaaatataaatataacctacagttgccttcatttctttccccttgcctaatatatgttcttggggaagaaccaaatgtgtagtaggaaatataagtttggccctactatagtagttgggtttccttttatcaatctgtagtataagacctctcaaaaggaattaggaaatttttgattgttgggtttgttttttttccttagagagaataaaagccttcaaaaaaaaattttttttttttggagacagagttggctgggcacagtggctcatgcctgtaaccccagcactttgggaggccaaggcgggttgatcacctgaggtcaggagtttgagaacagcctggccaacatggtgaaaccccatctctgctaaaaatacaaaaattagccaggtgtggtggtgggcgcctgtaatcccaactatttgggaggctgaggccggagaattgctcgaacctgggaggcggaggttgcagtgggccaagattgtgccactgcactccaggctgggcgacagaatgagaccttgtctcaaaaaaaaaaaaaaaaagagagtgtctcttttcccaggctggagtgcagtggcgtaatcatagctcaccacagccttgacctcctgggcacaagctgtcctcctgcctaagcctcctgagtaggtagaactacaagcatacaccaccatgcccgattaattttttcatttttttttttttttttagaggtggagccttgcttattgcccaggctggtctcaaactcctgacctcaagcagtcctcctgtctcggcctcccaaagtgctaggtttacatgcatgggccaccatgtccagcctcaaaaaaatttaaagattagctatagagagaacattaatcaaaatgaaattggcttaaactcctacagacaataaaaggaagtgatagtttgagaacataaatactaaatattgatggacttcttcaagttttttttatcatttaaaaagttcagggagaaaaagcagtatttcctactgttactgatttcaaatggcttatattcaggaatttttaaagtcctgggaattaatctctaaaattgttgacagatactgaaagtctcaaatatttgagtcaaatttgctatatactaataaattatgggatttaatttctttgcccaagtaaaaaggtgtgtgtktgttgttgctttcttaaatattttattttgatttctgtgggcacatagtaggtatatattgttggtttcttaaaaatttatgagtacttaatttaatatctaagtaatacttgagtcatcttaccaatttagactcttgaagctcttctgaatatttgttatatacagttaattttattagtggctacaaggttaactttttcttttactactgacaataataagtatgatctcaaggacaaattctacgctcttgtgagatagatttcttttcaaattgtatcgatggcttgctgctactctttgtgaaattgatgtccatcaaactgtttattggctttgccctcaagtactgactttgagttctggctgatcaaattttaggttattacttattaagtcttaacggttacagtaattgactattagcagttaatttgtgtaccaaagatgccacttcataagaatagttgggaatttgcttgcaattccttgtcttgtcctctacctctggaatagtttgtctcaaaatgatcaaccccttagtagttgggccttaaatgtttattaaactacttagtctgtcagtctgttcattattcttaaaaaaattgtagattaggaccacagtctatcctttgctagagaaaaaggatatatatttaccttagtactaagataatgcaaagcatgaaattataaatactttatttcactggatctaaaatgaagcacatcctgatttcagggtggttaatatgttttttaaaagtctcaaagtagatgaaatacagtaaattaaatcatcaaaaggtattataaacacatttatattaacagtgaaggcattctaccctcactcacctcttccttagtgtggtatgtatgtataagaatggagagattttaccaaactctgagttataaggcaagtatagaatatggccatgttggaatatgggaggaattatagaaaggtgaaatgaatcaaattaaagataagtagaattagtaactttttccctcgaattccctgtactcccttcctcaatattctccctttcccttctttcttttttatttttttatttttatttttwtttttggagacagggtctggctctgtcacccaggctggartgcagtggtatgatctcggctcactgcaacctctgtctcctgggctcaagcgattctcctgcctcagcctctccagtagttaggaccacaagtgtgcgccaccatgcctagctaatttttgtgtttttgtagagattgggggtttcaccatgttgcccaggctggtcttgaactcctgacctcagacagtctgcccccctcggcctcccaaagtgctgggattacaggtgtgagccacttcgcctggccccctctttctttttaagcaaaattcggaaagaacaatttataatttaaagaagatgaatccagaggttatctgtaatcttcaggagcttaggtctgaggaagtcagagttattggatagagaaaagagagaaacaaacacctgctttctttgtatcttgaagaggtttacagattttgaactaagcttacagctataacttttttctgaaagtgatctttaaaatacttcgttttgaattgtccaattcaattacacatacaacaacgaacgtaaaattattttttctttacagatcagtgctaacatcttccgtacacttcctccaagtgataatccagattttgatccagaagaggatgaacccacgcttgaggcctcttggcctcacatacaggtatggaacataattacgtattggcagtttttatatttatgctattctgcagaaatcatggttttctcatttagattctgagtgtctgtgtaaaatatttgacttttatggttttattaacattatcttctttcatgcaagtactgtttttcaatgttttttcattgtaataaaatacacttaacatatatttaccatttaaaccattttgaagtgtacaattcagtggcacaaagtacattcgccatgttatacaacccatcaccactctttaattctataacttttctatcaccccaaatggaaaccccattggcatttagcactcatgccccattctgctctctttacagcccctgacaactaccaatctgctttctgtctctggatttgcctattttggatacttcatataagtgaaattatgtaatatgtgggcttttgtttctgggttctttcagttagcataatgttttcaaggttcataaatgtagtctgtatcaatacttcattcctttttatggatgaattattccattgtatggatataccacatttgtttatccacttaccagttgatggacatttaaattatttccatcatttggctattgtgaatagagctgttatgaacagttctatgtataagtttttgcttgaatccataaatttttatacattatgtttttcttttctttcctttttttttgagatggggtctggttctgtcacccaggctggagtgtagtggagtggcatgatctcagctcactgcaacttctgcctcctgggctcaagccatcctcccacctcagcctcctaagtagctgcaactacagatgtgtgacactacacctgctaatttttgtatttttagtagagatggggttttgccatgttgcccaggctggtttcgaacacctgagctcaagcagcccacccacttggttcccaaagtgctgggattacaggtgtgcaattaatgacaaattctttcagtgtttatctaggaatgtcttaatttcctcttcatttttgaaggagagttttgctggatgtagaattcttggctaacagtctttttctttcaacactttgaacatgtcatcccatttgtcttcttacgtccatggttttctgatgacargttagccattaatcttattgaggatctcatcatgtatgtgaaaagtcgtttttcttttgctgctataaatgttatctctttaagttttgtcaatttgattatgatgtatctaggtgtggatcttcttgactttattctacctgttgtttattgagttacaattagaattcattatgtaaactaatatttttcataatattttatttatttttggtcatcattcaaatatttttcctgccctttttctctcatcttctgggactctcatttatgtgtatgttgctatacttgatggtgtcccacaggtctctggagctctgttcaattttcttcatttatatatggattctaggtattaatgccaattaatttgctgatttttttttaattttgcaagtttttatattctgtagtgacctttacattttctgttattataaaaagatgagagaggccaggcatggtggctcacacctgtaatcccagcactttgggaggccaagctgggtggatcacctgaggtcaggagttccagaccagcctaacatggagaaaccccatctctactaaaaatacaaaattagccaggcatggtggcacatgcctgtaatcccaactactcaggaggctgaggcaggagaatcgctggaacccaggaggcggaggttgtggtgagccgagattgcgccattgcactccagcctgggcaacaagagagaaactccggctcaaaaaaaaaaaaagaaaaaagatgagagaaagaaaattacattctatgtcgtttgggatactttatgcaatagtctgcctcattatttattaatttattcattctgtgtagcacctatacatccaaataaaatggagcggtgtcctaggattagtgaaagctgataatggttttaagatctttcagcmcattagagcttacagaactagaaaaatcctaagtggtaaattattttttaatagaactgtacacaagtttatctgaaattttgttccatagttggtgtaaaattaataatgctgtatatgaaatgtaaaggttttacatattctcattagctgataagttgataagctgataatgaaaaattctcattagctgattttttaatcagatgtagttgaacagtctgaaaaagaccccttggtctttgaatttttaaaagtaaagaaagtgttttcattagaatatatttatatgctcatggaaagtaacagtggaaattgagccaagtagacaatatgctttccatttttaactggtatgatttgaggttttatttaaattccctgaaaccagtggttcttaacattttaggaggtggtaagttgctttcaaaatatgattttttctttttttatttatgtatttatttttgagatggagtctcactctgttgcccaggttggagtgcagtggcatgatctcggctcactgcaacctccacctcccaagttcagatgattctcctgcctcaagtctcttgagtatctgggactgcaggtgcttgccaccatgcccagctaattgttgtatttttagtagagatggggtttcagcatgttggccaggcaggtctcgaactcagacctcaagtgatccatccacctcagcctcccaaagtgctgggattacaggcatgagccactgtgtccagcccaaaayacgatttttgagaagtagttctctctcaagacaaattcccagagatamaagaaattctcattcatctatggtcccttgattaaaaggctctgccttagatatagttaaaaaatctttctgaaaaccaaaatttctagaaaccaaaatttggcatacagtttttaaatttggcaattaaatagtctaaggacatcagaaactggtagatactaaagtgacctgatttataggatttgtcaatatattgtagctacgttattaatcatcttgagtgtttttagatggaatattaaaactactctgacaaattagattatagggaattgtagcactgaagaaatttgctcaatgaaagtttcttctgctattataatgtgtgcttaacccacctggaattcttttgtttcgtactaaaagtttacgttttacatttagcttatgagatcctagatgctagaaactaatttattagggtggaaaataaacattagttgttaatgagggagtaattacaagtaatctcaaaacctttcaagcctttgtttccccacccttttcatgaattttctaaacatgtgctaataaaagtttatctgtttttacttattcttacactgtaatggaaatactaatgagcaatggaataatggaataaaaagagatagaagaaaggwccacaaggaaggtcatttcagtattaggggataggttgtatcttctaatttattaagtgtagtattacatggtaacttaatgtacaacagttttaaattattttctcatttctttcctaagtattattgctttctatttattgaagactaacaatatattaattttctgcacttttagataattaggacacttggctgctgtactagcctggaatacaggcagattgtgtattttcactttcttttattaattactttagtggyacagataattaagatttaattatgtaggatagtgcctagaacatagacctttttaggaataagttgtattttagggattagaaggcttttctctctgggcaatataattagaaatttaaactagcaacatacatatattacagtgtacacctttacattcaaataactcttggccatatactatattttaaatattttcatgggctaagaatccaaaatggtaggaatcatagcctaatgcactaactttatagccacaaaaataaaaaggaatatcttttatataaggttgagaaatactttcattgctttggcctttttcattgtgaatagttattatctttttagttcttatggataaaagagcagagggaaaaaacctaggctccctgtatttaaactattcaaggtttatgcacaatctgtgttttcacaaggattacagagaaaaacagattcttaaaaaactaagattttgttaatgtttacctcatcccaggcaatgttctttttgggtgcttaatatataatatctcatatagttgactatgcattaatttttatatgaattcttttatatattaaatcaattaaaaaccttatttacgtttcctcttaatagaggttggaaaacattggtcacctgtattacttgaaagcagcctcttaggtacttgtaggtctttaaagtttgcttctgagtctttgcctctctgacccaaacatttctattcctttagctttttgtataggtcttatttttcagatactttaatcatctatgctgttttctgttggaacttctcccaagtctttttaatggtgaagacyagaattctatgttttatgttaactcccttaggaaagacatggtcagaactcagtagaatagtaagattacactcctcaattccctatactttttagttatctttcactttttagggtatttttggtgtacagaagtagaaggactagccatacattgaacatagttgaagtttgtcattttattagtgaactgaattcactggtgaagtgcctgtttttctttgcaacactgtttcttagattcttggagcaagttatttgtatagaagaccatagaaggctgggcgcagtggctcacgcccacttgtaatcccagcaatcccagtaatcccagcactttgggaggctgaggcaggtggatcatgaggtcagaaggatcatgaggtcaggagttcgagaccagcctgaacaacatggtgaaaccccgtctctactaagaatacaaaaattagccaggcatggtggcacacgcctctaatcccagctactcaggaggctgaggcaggagaatggcttgaacccaggaggcagaggttgcagtgagccgacattgcgccattgcactccagcctgggcgacaaagcaagactctgtctcaaaaaaaaaaaagaaagaaaacaagaccatagaaaaacttcagtcactacgtagaaacacaccttcttaacaaatgtgattttcattcattcagtaagcatctattgtgtgtcaagcatttttgtaaacattgagggtaaagtaatgaactaagcaaaatcccttacatcctagcagagaagaacaaaataataataaaataattggcatatattctatgttacggtgtgatacattttttaaaatgtaggatggagtaaatagagagtgacactgggacaggataaattttatagaagcataatctcaattattccattttgaagatttccagctctgtagatcactagtgtttcttctacctctatttgggataactattcatcatttttatttatttatttttctgagatggagttttgctcttgttgccca[131 bp omitted]ttttagtagagacgggatttctgcatgttggccaggctggtctggaactcccgacctcaggtgatccacccgcctcaggctcccaaagtgctgggattacaggtgtgagccactgcacccggacctcaatatgtatttaagtaactttttgtcatcatctctttagtggtgctaagttggcggcataacagcattttgctgctaattttgactgatcacctaatgtttactgtgtcaggtaaatgatgtagatgaaaactatgaaagaatttatatgtggtatttgtgaatggcacaggtttcaattatatatatggttcaattatatatatggtttagagaattcagtttgagagaattagagaattcagtctgatttgtagcttgatgtcataaaagtctcccataggacaggctattactytgaaaactattaagccttaaaccctatatttytgatgaagatcttaagaagggagagtaaataggctaatgcatgccacatttggctcatgtttaatgtttaacctgatcccmccttatggtggaatctycagggatttgcataaagatttggagtctataattccataccatcaacctatactctgcattctcttcatytcaagacatgctgcttaaaaaaaaaaaaaaaaaaaaaaaaakccaggcatggkggcttacaccttaccagcacgttaggatgctgaggcgggtgcatagcttgagcctgggagttcgagaccagcctgggcaacgtggtgaaactctgtctctaaaaataaataaatatatatatttttaaatcaagacatgctgctacatttctataaaataaaagccatcctcttcctgaggatccagaatcaaaacaaaggatctagaatcaaaacaaatgcagggctcaagttgcatatcctccttaaagcttttcctacctattccacagtgatacagcccttttctaaatagctcctgcacttatagtctgtgccacataatataatttttgtgtagtgaatgggctttttgagccataccatccctaatgtctgttcatactatacatagcccagtactggacatgaaaataggcactgaatgaattaagttgtgccgttaatgaaactgcatagcagtccatgagactgtgctgacttttcagagcgctctgtgatcagttttgtatatctttttgcacgtgtataccccaaagcaaaattatcttttatctctattgttgtttgattagaaaattatctatgaataaaaacttaaattgctatcaagttttatttcttgttatatccttaatttatgataaacacaaaatgttaggtaacattagaccagataagcatcactccttttccacagttgggcagagatacatcaagcaaaattgtatttgctcagatccccaaacttttgttagctgtagactgttactgaactcacagtagtaaaaatgtgttgttacttggtgaatgataaggcctagatctggtagtgcttttgtttgctctaaggtctattaatttaatgtagcaatctttcttttccctttttcttttctaacttctacatcaacctaactggctacctaaatgttcattgaatgactgtttttgctttgggatagaatcctccttttttatttttagggtgttaaattgatatagtattgtttaatagctaataagatacattttgggctaagtttctgctttttatasctattaggttacaataaaaaaaaactttagtcatatttgcctttctccttgaaagcaggtatgatagtgacaagctgaaccaaatatttaattctgatttgtggtagcaagtgaacatttgctattacttgtaggttgcttggcacttttatagaaggcctgctatgacttctagtttatttgctgtggttggtacacagacatttcttccctagccctgtacttacgtaatttggttcattatttctcaagtgtggataggatatgcctggttttgatttaattagttttcccactgtagttttatagaaagaccagaagtttttcttttcctttctttttaaaaattaatgatacactgcctgttttatctggaggttgttgactctgcatttaagaaactctgtagtgattaaattgaggtaggtagtagtccactgggaaggaacatcttcctagtgagtatggattacaaaataggaatatatttaattaagaaatatttaattttataggcattgtccttattttctagctcctgtaatttaacgttttgcatcaagttatgtaaagcaataaataaatctcaaagtttatcagcttaggaaaccaaatggtgaatatatagtttctaggtttgtttgtttatttatttatttatttttcagacagagtctcactctgttgcccaggctggagtgcagtggtacggcacagtcacggctaactgcagccttgacctccagactcaagcagtcttcctacctcagcctcccagtagctgggacaacagacatacgccaccatgcctggctaattttttgattatttgtatagacagcggtctcaccatgttgtccagggtggcctcaaactcctgggctcaagggattctcccacctcagcttcctaaagtgtgttgggagtacaggtgtgaatttttwaaaaaaattttttttatcaactcattacattttataatgagatctgaaatctccccactaagttggtaagaaaaggtgtgtttttaatatgaagtgattatttagggtaatattctgtagccatcatcttagcctttatttgactttctctcatagttggtatatgaattcttcttgagatttttggagagccctgatttccagcctagcattgcaaaacgatacattgatcagaaattygtacaacaggtaaggaactcttttgtcttagattctcatatattcatcttagcaatgatttattaacttattattaaaatagtgtagtctttcaaaactttaatggtttaatttgacagcacttaatattactgccaaaccattagaataaaagtgaagttagctctgagagtacaagagtatttttatcaagggtgagagwctaatgaagtcaatcaaattatcctatttaatcctaaattatcatagttattttataaataccagaaaaacaagcctttctgcagtatctgagaaaatgtggtatgaccattcaatccatgggcaaatctttgttttacatttgtaagtctttgaacttgacatatattttaagcattgggactttgaaatgacgggggaaaaaaggagtagaatcattgtgaggaatttgggctttaggctcctttcctaagtatcaattaccttttcctttttctttcctctttgcacctaagccccaccacccaattcctaaaccacagataaagtggaatcattaagaacgtaaggaggtagaattaattgtgatgccttcttttttttttataaactgcttattagctgttatttttggaacctacatattcacmatttctaagaatatattcattttcaaaaccttttcaaaaatttaaaggcctcttttttttttgagagggagtcttgttctgctgcccagactggagcacagtggtgcaacctcagctcacttcatcctccgcctcctgggttcaagcgattctcctgcctcagcctcccaagtagctgggactacaggcacacgccaccatgcccggctgattttttttttctatttctagtagagacggggtttcaccacattggccaggctggtcttgaactcctggcctcaagggatcctcccacctcagcctcctaaagagctaggattacaggtgtgagccactgcactggccaaaggcccctttttaactatatggaattggctggccccaaagaaaattgtgaagtagaccaaacctttctaggcatttctaggcctgagtatgcaggcctctttaggaatttgatgctgaggccaggattaaaatcattgcaaggacctttcctacccttcagaccgctttgtatgtgccctatgataaaaattctactaatgtgagtttggtatatttagagctgatctttggtcattcataactacccttgacctcatataaagtattctgacctgttgytgtgaaggattgataaatgaagaacattgtcagcctaaaatatttccttcaaccattgaagtagctcttcataaactataaagaaatattaggtgtgtattaacagtaacatatacattttaatcatgactaaaaattacattaaatggagttatgttattttggtaattgcaaatgaatgcctgtttatttccttgtgcagctcttgtgtgggatrcattagggagctctagtaatgccatatgaaattgtatttaatacagtaacaggttgaggggaacaattgccttagtgctttgttagtctagagcttgaggtatttaagctgcwgtattattttgtggtgtgaggggagcaaaaagaaaactggtggggcaggatctgttttctaccttctactttaaatgcttgaattatctgagaagctagggcccagtaattgcttttagcagtttatatggctgttttgctcttgttgcccaggctggagtgcagtggctggatcttggctcactgcaacctcggcctcccaggttcaagcgattctcctggatcagcctcccaagtagctgggactgcaaatgtgccgacatgcctggctaatttttgtttgtacttttagtagagacagggttttactgtgttggccaggccggtatcaaatccctgacctcaagtgatccgcctgccttggcctcccaaagtgctgggattacagttgagagccactttgcccggctgccatttttaattagaataatttgatgtgaacttattagatatattaacaaaaattctcatactccgtagatatwttttgctggagtctcatgagggccttaacagcctagcaaacaaagaatggaaactataagtatggcagttgttttgggagatataaatatgatttaagtcatccactctggtttcagatgcatgtgttagcaattgtatataattcaaaacaaaatggaataagaacttctgatgmggttcagagcttgctatctttattgtaattataaacacgaaagttcagaacataaaattccttgacagctttacagatacttgtactctagagagagtattttatatttttctaagaaaatccaatgtttaaaatacagtgttttttttgacagaagaaattaagtttctttaccattttaaatggaaatttgagattttgactttaactttttctaaagtctcttctctcaggttttgctgaaaagttgtgcagmatataggagtacactgattgggccaattgaggtataggagagtgctgactgtggaactggtttaaaatttttcagctatttgctaagctgaaaaatctatgggctgggcatagtggctcacgcctataatcctggcactttgggacaccgaggagggtggatcgcttgaactcaggagtttgagaccagcctgggcaacatggtgaaaccccgtctctaccaaaaaatatataaattagctgggtgtggtggcatgtgcctgtagtcccagctagttgggaggctgaggcaggaggatcttctgaccccaggaggtcgaggctgcagtgagttgtgattgcatcactaccctccagtctaggctacagagcaagactctgtcttaaaaaaaaaaaaaaaaaaatttggcctcatcttttagtccagtgttattttatatatgatttctactctattagtatgtatctgccaatattttattctaataactgaatgttaatttttcaaatgtctgcatggtaactgtcttgaatttattgtaaattcacaaaaagaagtcttagtatatgtacatctttctagtaaactagaaatatacatttacacatggatctttttaagactatttgatgacttgcaatctaaaaacttaaacgattttctatgtagttttgacgatcaaaaagcattaaaaatcccaaattttaacactccaaaattgtgagcctctttagtattcaagagtaggattgaattttaaaatcagtgggaaggtaaagaaaaatccactttttgaaatatttatatttattgtaaatgtcatattttgaagtgaaataagtgagaagaaatatttcctaagcttttcctcaccttcattacttagcaagaataaagtcagtgtggtaaggaagaactctaaaaaatttttaaaagatgtcatggataatctttaagatcaaaattagaataaagctttagctcgattattttttaaaagtaatttctcaggtttcttttaaagctcctggagctttttgatagtgaagatcccagagaacgtgacttcctgaagactgttctgcaccgaatttatgggaaatttcttggattaagagcattcatcagaaaacaaattaacaacattttcctcaggtaaattaatcatttattgtatattgcaccttttcctcctacatatcttcttgtattcaagttcttttatttttatttgtttttttgagacagggtctcactctgtcatccaggctggagtgcagtggtgagaacatagctcattgtagcccccatctcccagactcaagcaatcttcctctctcagcctgccaagtagtgagactacaggtgtgcaccaccacgcctgggtaatttttttgacttttagtagagacaaggtctatgtactgtatgtacgtagtatatatatgtaacatatatatgtaacatagtatatatgtgtaacatatatatgtaacrtagtatatatgtaacatactatgtatgttgcccaggctggtcttgaactcctgaactcaagcagtcctcttatatggggcctatcatttgcttgtagtcatccctcagtatctggggaggattgattccagggcccctgctaatagcagaatccaaagtcccttatataaaatggcacagtatttgcatataacgtccacacatcctcctgtatactttatttctagattacttacaatacttaatacagtgtgaatgctgtgcaaatagatgttattctatattttaaatttgtatttatttttcaaaaatatttttgatctgtagttggttgaatgcacagataatgaaacctgcggatacagggccaagtgtactttataaatattaatctgttaagtagttgcttcagatcaggagatttcataacaacacccacattcaaggtttggtttgtttaattaattgaagatctggcaaaatttggttactattcccacattgcaacaattagagatgagtaatatctgcctcctctagagtgaatatctttctccagttctctgtcatcacttcctaagcccatttcaaatatctgccctattatatttatgtctccctgctttaaaggcagccctaatcttggaaagctatgcagcctatatagttagaggtgtaaagaaattctgattaaaaatggctttattacatatgggtctttttctcttggatttccctataattagaggtttcttattttaaaaagtatttctttgaggaaacttatctttcttattaattattaagttgaatattccaggtgaaatgacaatctgttatcttcacatatggcgagttttggcaaaggcatatgtagttcagtaggaaacatcttcttttttaagattgatatgaattaactgtttggggcaaaactgcttataagacccaaaacatgcttgtgtgtttctaatagctgtcctttggattgatttcttcaccctcctgcctgtttctcttagttttctgaagtttgattttgattacatcttgtctttattttaaattcaggtttatatatgaaacagaacatttcaatggtgttgctgaacttcttgaaatattaggaaggtaggtcaggtttttttgttctttttaagaattaagtaagtgaatgttttatgtattaaaatcttagctggggttggagaaattatgtcatattttagagtttaaatgtagaacacatagtttctcaactgaagtcttttttttttttttgagacggagtttcgctcttgttgcccaggctggagtgcaatggcgcgttctcggctcactgcaacctctgcctcccgggttcaagagattccccagcctcagcctcctgagtagctgggattacaggtgcctgccaccacacccaacgaattttttaatttttatttttagtagcgatggggtttcaccgtgttggccaggctggtcttgaactcctgacctcaggcaatccacccccttcggcctcccacagtgctgggattacaggcgtgagccaccatgcccagcctcagctgaattcttattaccttttgccataacactttgccttccttattcactacgtattagtattaagagaattttagacccttctgttactatttagacaatgattttagtttcctttattaatagtagaaaatgattgtggagagaactacttctttcacgttatccaacaaagtaagaaaaattacccatttacttcaraaaaatattgaacrttctaacaatattgtggtactgactctcctggagctttgggggcaaaaataaaagcaacaatgcataaagtgacaggtttgatagaaaatgaagatagaaattacttgggaattaattgacagtcctaattttcttttggaatcatcaaatgacttagaggaacagacttcatagtaatagtcttcctaaagtagtttgaagatgagcagtcatacaacaccaggattgaagcanagcactgttccttatgtactcatggatatgacagcttttagaaacaaagtagtaactacttaacccttcccctgcctttttttccctccagtattatcaatggctttgcattgccactgaaagcagaacataaacaatttctaatgaaggttcttattcctatgcatactgcaaaaggattagctttgtttcatgctcaggtaagtttcagaaacatttcagatgaaatgaatattatttcaaaggccaatataaaggcagagaaattgagaaatactgagatgacagttttaagtataattaagcaatttgcttacaaaattacccaaagcaaatttttcttattttaaagtatttagttgttaagtaagaccaattatttaatttctatatctacacttacagtttaagatacacactttcctcatattatagtccaggtcttgacctaattatgtgactttgaataaatcccacatatctacagaatgtttcttccagctgcaataacctagacctagttagagagattttggtctcttctattaatatttagagaataatatatcagcataggtgtacatgtagaaacatgctgaaaaactaaattgttagctctagtcttatttcagttaactttatagtcagaaattactactaaaaatgtttttkaaacttgaagttactttcaaggctaaaaagttacacaattgtgagtatagtttcacgattgaggtatttcacaatttcattcacagttgtgagtatatttttatatattggaataatttatcaaaatgaggtagtctaaaaaatattggctaaatataaaaatcctacattattaaatgttatctcactaatatttataaactgtcccttaccttttagctagcatattgtgttgtacagttcctggagaaagatacaacactaacagagccagtaagtgttctatttattttcatgtttttggtctgcattaatagcatttcattgtagctttcgttttatagcctttatagttattaagtagaataatgtacgttaagctwaaatcatttagaagaagaaatgtgagattaatctacattaaaagaaggggttaggaggggagagttctcgtgagttatgtcttgaataaccgaaatatagactactattaatatgtagtagttaagatgtacgatgataggatcagatgaccacagtgaaattttatatgcatactgtcttcaccaataatcttttaaatcttcattcaccttttggaattaaagcatacttcgagggtcccaaaactactactcccttgaattttgttttgtttttaataatagaatttttgccactcattaacaataaaccacttgatagggatagaaaacatttccttgcttttggtgattaagatataagatgtaatcttggaataaaagtagtttatgaaccagcaaggcaacttaggctttgaattctactgttatttgcctctagaatgaaaattcaggagagagtgaaaacataattagttatgaaaatttactgaggattcaagaaaaacaaaagatgaagtagggtgaaacagaaaagtataaaagcatagaaaacattttaaccttggtgaagtaagtattttgagagaatgctttctaggcatgttcagtctaaatatttacctagtattaggttggtacaaaagtgattgcggcttttgccattacttttaatggcaaaaaccacaatcactttagcagcaacctaataaatatttagtaaatagcaaagggtttgaaaaactaaaatatatatgtatttttactatattatgaaccttctcaggctatccrtagggatgcttgaaaaaatcatatacttagtattctccctttcacttgaactttgtgtaatggaacaaaagacatttttccactccttaatttttattagttttttgacttttagatttacagtcttttctagaaacagctgtaaacagtttttgaagacaattcaggagaattagaaaccatatatttgtacatgaaaccacataaacctctgaagttgattcccrggtgtgcagtggctcacaactgtaatcccagcactttgggaggctgaggcaggcagataacttgaggccaggagtttgagaccagcctggccaacatggtgaaaccctgtctctagttaaaatacaaaaattagctgggcatggtggcacaggcctgtggtcccagctactcagatggcaagggcacaagaattgcttgaatccaggaggcgtaggttgcagtgatctgagctcataccagtgcactccagcctgggcaacagagtgagactctgtcttcaaaaaaaaaaagaaaaaagtaaaaccttaatacaaatctatgataactcccattagaattaagaaaaagaaaacccataataacacatattgaaaagtcatggttcatgcttggtaaatagtatacaaataaaattttatttaattaatttggggtggataaggaagacaggtgatttatttttaaagaatggaagatagaggctgggcatggtggttcatgcctgtaatcccagcactttgggaggccgaggcaggcggatcacctcaggtcaggagttcaagatcagcctgatcaacatggtgaaaccccatttctacttaaaaaaaaaaaaaaaattagctgggcatggtggcgtgtgcctgtaatctcagctactagggaggccgaggcacaagaatcacttgaaccctggaggcggaggttacagtgagccgagatgacacacaaaaaaaaacaaaaaaacaaaaaaccttgacgattagggagagggatgatggccagttattcagcttttatctggtttggctgagttgggttaatgaaaataggagcaggatgaggagagagagtaagataaatacccaggttaagaaaggaaaatattttccaactcataaagatctctcgatatagagatcttgcaatttctaacataggccattccagcaccaaaattacggccatattacttgggtttaagccttaatactaattttctggaaagcaggcattcctatcaaagctttctacaaattataagtagctcagagcttttgttagtttattactcaagcctgtaatcccagcactttgggaggctgaggcaggcagatcacctgagatcaggagttcaagaccagcctggccaacatgatgaaaccccatccctactaaaaatacaaaaattagccgggcgtgatggcgggcacctgtaatcccagctacttgggagactgaggcagaattgcttgaggcaggagaatggcttgaacccaggagggcagaggttgcagtgagccgagatcacagcactgcactccagcctgggcaacagagtgagactccgtctaaaaagaaaaaagtgcagagtggaagaattaactaaatattcattacagctaagtttccatgtaaagaggaaaaaaatgaagagtcggcatgactttcaaaacttttattttttggcagtgtaaacctttccttccactcaaagcggcatttttataaaacaannnnnnnnnnnnnnnnnnnnnnnnnnnnnnnnnnnnnnnnnnnnnnnnnnnnnnnnnnnnnnnnnnnnnnnnnnnnnnnnnnnnnnnnnnnnttatattttattttattattttatttttattttattttatattttatttatttttttgagacagagactcactctgttgcccaggctggagtgcagtcagtggcaccatctcggctcactgcaacctccacctgctgggttcacgcaattcttgttccttagcctcctgagtagctgagataacaggcgcccgataccacgcccggcctaggtttttttttgtatttttagtagagatggagtttcatcatgttgcccaggctggtctcaaactcctaagatcaggcagtgtgccttccttggccttccaaagtgctaggattacagttgtaagccactgcacctggcccacattgacatctttttgggggccactagtcaacccagtgttcgttattcaatactgcccgacattgaaatttgtgtatgatgagggtaaggaactacatttgggtttgtttgtttgtgttttgggtttttttttttttcagacaggatctcaccacatcacccaggatggagtgcagtagtacgattgtggctgacggcagccctgacctcccaggctcaggtgatcctcctgccttagcctcccaagtagctgggactacaggcatgcaccaccatgcccagctaatttttttgtatttttggtaaagatgagatggggtttcaccatgatgcccaggctsgtattgatctcttgggcccaagcctgccttggcctcccaaagtgctgggattaaaggcctgagccaccatgcctggcctgcattcattttcaattacgcatatcaaatgatcacaaaatttattggcttaaaatagcaagcatttatggcctttatcaaagctgcagctgcttccatgtagctgctgtggtcaaaaagaagccaagagtgacagttttccttgatggtcatagttctgtttgctgtaactgatctgcaagattttgggaaaataycattccattgggaggaaaaatgacaagcatttgttgccttagttgctgtgaatccagaatctggtcatggcttaggtgggccctctgctcagggtctcttacaaagctgcagttggagtgttggccagaagttgagtctcatataaagtgtcagatggggaaggatctgcttctaagttcacatgtatgttggcagaattcagtttgtcaagttatgttggactgagagcctcagttcctggctggctgttggccagagcccaccctcagatccttgtcacccaggcttctccagcatggcaccttacttcatcaaagccaagacagcgagtctactagtaagacagaagtcacaatcttttgtatcttactcatgaagtgacattctttcacttttgccacagtctgttcgttagaagcaagtcactaggacagctcacacttaaggagaggggattacacaagggtgtgaggacagttaacaagctcatgagatcatcatagaagtctgccaaccaaaggagcctgctacatttttcctttctaaatagtgagctacctgtcccagtaccaccactgtttcccatggaactgaaaggccacctttgtcatatattaaaatccatatatacatgagtatatctagatactcatatatatcttttctctccatttctttgccaatataatcttgttttagttgctgatatccataatacaggttctgttccattaactccccccaccaaaaaaacaattcttatttgcttatatttatggattttagaataaatgtttctagttccaaaaaataattcaattggcatttgattgaaattatattaaatttacttataaattaagtacaggaaaaatatctctgcacaatattgaaccacctcacttatttacagtcatgtgctgcataatgacatttcgtttaataacaggctacgggccgggcgctgtggctcaagcctgtaatcctagcactttgagaggccgaggcgggtagatcacgaggtcaggagatcgagaccatcctggctaacacagtgaaaccccgtctctactaaaaatacaaaaaattagctgagcctggtggcgggcgcctgtagtcccagctactcaggaggctgaggcaggagaatagcatgaacccgggaggcagaggttgcagtgagccgagatcgtgccactgcactccagcctgggtgacagagcgagactctgtctcaaaaataaataaataaataaaaataacaggctacatataaaatgtcagtcccagacaggcgtggtggctcaggactgtaatcccagctacttgggaggctggggtagggggatctcttgarcctagggggttgcagtgaactgtgatcacaccagtgcaccccagcctggccgacaatgcaagtctggactgtctcttaaaaaataaaaatggaactgggcatggttgctcatgtctgtaatcccagcactttgggaggccaaggtaggaggattggttgaagccaggactttaagaccagcctgggcaacagagcaagacctcgtttctacaaaaagtaaaaaattaaaattagccagatgtggtggcatacacccgtagtcccagctacttgggaggctgaggcaggaggrtcatttaagcctaggagttcaaggttacaataagcctaggagttcaaggttacaatgacctctgatcatgtcactacactccagcctaggcaacagagtgaggcctcatcaaaaagagagagaaatgttgagagagagagagagagagagaaatgtgattccaagagaaagaaaaatggtgatcccataagattataatgctatatttttactgtacctttcgtgtttagatacacaaatactattgttacaactgcctacagtgcctacggtattcagtacaagaacatcctgtacaggtttgtagcctaggagcaaaaggctacaccatacagcctaggtgtgtagtaggccataccatctaggtttaagtacaccctgtgacatttaaatgatgaagttgcctaatgacacatttcttagaacgtatccccatcattaaatgacatataactgtatttgtagtcttctatgatcttcagtaaagttttatgcttttctccatatgtcttaagtatttcttgcaaatttattctttatgcacattatagttgttgttgtgaaaagtacctttttattattcatctgatttttactgatgttttataaaggtattgatttttatatatrtattttttaatgtggccacatactgaattttcctactcactctagtaacttgcagggtttttttttaagttttaagggatatataaatatacagttacacaaataagtgtaattctggtattcctttccaacattattcatcacattgttatcttactggattgtctccaaaacagtatccttcccaattttaatttgaattagtgttccacattactggaccagacagactataaagtaacctaaaaagctgtcaaagatctatttccacaaaaccaccaggcctagatggttttacagcctgtctctaataaatcattatgtagaatgattgctggtggtttctgataaattcttttagttctagcttactaaatttttttatcagaatatatagtcaattaaaaatgtcaaatgacttgaaaatcttttaaaatgatctgggttttttttttttatttccccttttaacctatgaatggaaccatcctggcatttctggaataagttacaattaggcatatagcattcttctattgtgattcagtttaatgcaagtgttttcaactttgtttatttaaataaatagtctccactttgggaggccgaggctggtggatcacaaggtcaggagcttaagaccagcctggccaagatggtgaaacctgtctctactaaaaatacaaaaattagctgggtgtggtggtgggcgcctataatcccagctactcgagaggctgaggcagagaattgcttgaacttgggaggccgaggttgcagtgagtcaagatcacaccactgcactccaacctgggcgacaaagtgagactccatctcaaaataaataaataaataaaaatagtctcttttgtttcattgtattctggttataaagattgtgctagccatgaaatagactgagaagctgtccagggtttttttttgtgtttcataatggtttaaataacaggaatcatctgttccttaaggtttctccctaaaataacctccctctctcaccccaccaacttatattttcctttattttcttagaagtagcacatactattaaattgttttatttatgtgtttaattgatcacttgcattggtcttcctccattagaacgtaagctctgtgaaaaccagagacctcatctgtcttgtacatcagtgtgtccctagcatctagaacagtatctggtacataataggcacccagtaaatgttagttgaattaataaaattctaaagctgagcagaaagtctatttatacacatatattaagcaatattgatttacttcagaatgagtgttgatataatcacagctatggaaaatacgctgggattaactagctttgttattaaattcatgctaaactttttctttttcgcaggtgatcagaggactgctgaaattttggccaaaaacctgcagtcagaaagaggtgggttttgttcactaaatgtagtgcattttactagaacttgtcaatcccagggctataaaccatgcttctttgggctggctgtattgctgttgctaaagagcgggagatgtacacagacttggtagaagacctgtgctatagtaaactctgccatccagacwtttttttgcytattgtatactatgcagattaaccttctcatttgtatggtttctatattagtttcacataatttatcatgtttcttaaaataaaatttttttaacctaggtgatgtttttaggagaaattgaagaaatcttagatgtcattgaaccaacacagttcaaaaaaattgaagagccacttttcaagcagatatccaagtgtgtatccagttctcattttcaggtatgatgttttcagtgaagcctttactttacactagtatttctttcctattttagttttgacatttctctaaatgtctttttttaggttgcagaaagggcattgtacttctggaataacgaatatattcttagtttgattgaggagaacattgataaaattctgccaattatgtttgccagtttgtacaaaatttccaaagaacactggaatccgtaagtatcttttatataggtcgtatttttttctttttttttttttatatctttttgttattgatttcctaactcatacttgaaacctattacagatttggaagttactccaaggttaacatcagttgtattctattctgtattttatatacgtatacctttatcaagttataaatgtgtgtgtttgttcagtatgtggtcttaatgtcaatttatttttaaaatttttttagagacagccgggcgcggtggctcacgcctgtaatcccagcactttgggaggccgaggcgggcggatcacaaggtcaggagattgagaccatcctggctaacacggtgaaaccccatctctactaaaactacaaaaaattagccgggcgtggtggcgggcgcctgtggtcccatctactcgggaggctgaggcaggagaatggcatgaacctgggaggcagagcttgcagtgagccaagattgtgccaccgcactctagcctgggcgacagagcaagattccgtctccaaaaaaaaaaaaaaagagagtcttgctctgttgcccagactggagtgcaatggtgcaatcatacctcaccgtagcctcaaactcctgggttcacgcaatcctcctgcctcagcctcccgagtagctacgaccacaggtgtgcaccaccatacccagcgaatttttatttttattttttttggacagttgaagtctcactatattgcccaggctggactgaaactcctgggctcaagtgatcatctcaccttggcctcccaaagtgctgagattataggcatgtaccactgtgcccagccttcatgtcaatttaaaattgcaaatctccctggaggttgtggtcaaaccctcttggggagaccaactgaacatttgcagaggatacacaaactactccgttaatgcagagttgtgttggtctactctcagtgtatagtctcccctctataaatggcactgtcccaggggaaagccgaagtgctaagggtaatatattctaacttctttaacatccttatccggctttctacttttcataagttttggtaattggatctttttcatcttcttttaatgttgttactcaggatttcagacatgagactgtaaagcagaaatgaagataactatagtgaacatttttaactagagtttaatgtaagcatgataaaatggaaaagatttaagttttcttagactgtctctaccaccacttgctgtatgaccttgagcatattacaaacctcttgagcctcagttttatcatctctaaaatggattaaatgaaatcagccaagctttaacccattttagagaccatagtgttacatttcctctctgttagcagtatcataactcaggactggctcattttcatttcaggaccattgtagcactggtatacaatgtgctgaaaaccctaatggaaatgaatggcaagcttttcgatgaccttactagctcatacaaagctgaaagacagaggtatttgatattttgaattacaaaattatctatacattttatgttagttgaatgtgattcagttcaggaaggtatcttctctcagttcagattttcatatttaagaagttaattaccttatagtaaacattacaatgtgaaagtctcttaacatataagtcatttccagataaactagccccagtatttttataaatttgttaaagcagaaaaagcagtagcatttatttttgagggtagttacataatttacttcctctaaatggttagattatgattttaatgtggatcataaatcctgtttatctcattctgagccttagatttcctcagtctgttagcatctgcatatgaaatataatttatgctgaattttaaatatcaatttgtacaatttgattttttatccatgcatttacgaaaatcctttttgtccacgtgggcttccagagtgagctttacttttcaagtgttctttgttagcagtaggtaattcttacgctgtggattatcagaaggtggtattttaaagtcagcatagttctcctttgggaagagggaagtcacataatgatatggcttagggtactattaatatgttgtccttgcaataatatgtattttagagtataaatgttagcacgtatcagcctttaggaacatggcctagtgattacctctttttgagaatttcataaattactataaaataatctttcaagagttactttcttctcatatgtttatttcaaactcaagaagcactttcttaaacttaagtggttagtaaccagtgtacctgagcccacccattatttgaggataacagttaccatttacttctaataagcatattacctgttctgtttagaaaagctatctattttgacaagttcctagttatggttatcttaaagtagaaaatggatagcctttcttcaaagccatccagcccattaataactaactcaatgcattatttcctttaaatagcagcattcaggcaggaatagaaattaagtacatgttttgagcctcaggaagcaatgggaagaaaataagatgactaggatcataggaaacttgtatttgaaaaatatgtatttcacatgactaagaatatactcatcatttcttacctgcataaatcagcaaatcctttaaaaggatttgtccttttaactcataactgcagaattataagcctatgttttacatgttcatggagcctttcagaatagacaggttcaagttactcagaaatgttttccttagaactgaaattaattagttgaaacgacatatgaaatattttgaccttcattttgttctagagaaagattactgaaactaaagttttcatttgacatgtaaaagaggagctagtaagatacaaactggttagtggctagagatgtggctgttagtggcaaaaatgatgtggcttctgtctggtgtggtgaaggaagtgcttcctactgacctagtggccagccccttcagcctttgtaatactgattagactactacaactgcaagatgtttacgtgagaaaattgacgtgtaagtactttgttgactataaagtacagtgtcatggtagtgataatgtgtaggggacagaaagcaagtagtaacgtctagctggtasaggagatgcacagactcagtacatttaggagagtgacaagaagaaattaggtgctccaggtaagtggactccaaagctttagcagagggatttaagtgaaatgtgggtaagtaatgtgttctccagtaagctgtcaaacagcacctctctttgggttctgaaataatttctgattacaaaaattttggtttatctacagagagaaaaagaaggaattggaacgtgaagaattatggaaaaaattagaggagctaaagctaaagaaagctctagaaaaacagaatagtgcttacaacatgcacagtattctcagcaatacaagtgccgaataaaaaaaaagcctcccacctctgccggataggcagagttttgtatgcttttttgaaatatgtaaaaattacaaaacaaacctcatcagtataatataattaaaaggccaattttttctggcaactgtaaatggaaaaatatatggactaaacgtagccctgtgctgtatcatggccatagtatattgtaacctttgtctaatcattggatttattgtgtcacttctgaagtttcacagaaatgaatgaattttatcatctatgatawgagtgagataattatgggagtggtaagaattatgacttgaattcttctttgattgtgttgcacatagatayggtagtctgctctgtatatttttcccttttataatgtgcttttcacactgctgcaaaccttagttacatcctaggaaaaaatacttcctaaaataaaactaaggtatcatccttacccttctctttgtctcacccagaaatatgatggggggaattacctgccctaacccctccctcaataaatacattactgtactctggaatttaggcaaaaccttaaatctccaggctttttaaagcacaaaatataaataaaagctgggaaagtaaaccaaaattcttcagattgttcctcatgaatatcccccttcctctgcaattctccagagtggtaacagatgggtagaggcagctcaggtgaattacccagcttgcctctcaattcattcctcctcttcctctcaaaggctgaaggcagggcctttccagtcctcacaacctgtccttcacctagtccctcctgacccagggatggaggctttgagtcccacagtgtggtgatacagagcactagttgtcactgcctggctttatttaaaggaactgcagtaggcttcctctgtagagctctgaaaaggttgackatatagaggtcttgtatktttttacttggtcaagtatttctcacatcttttgttatcagagtaccattccaatctcttaacttgcagttgtgtggaaaactgttttgtaatgaaagatcttcattgggggattgagcagcatttaataaagtctatgtttgtattttgccttatgtcatctttgcttcttttagctctaagcttaggcatacaggagaagtctgcccccctttttacatacatatgtgtatttatagaaacttttaagacaaattgtgggacgaagtctaatttaaaaataggaagattgtgtgccaaggttgagtgttctagccctttaccaaaatatgttttacagaatatttgcataaaattctaagttctaggatatctttccatcatctttcatatccttgtatgttaagaggatgggtttaatttactttgaagctaatttttcataatccataataaatagcacttctagtgaagagcagggagcctgtggcacagttagaaatcaggtattattggctgggtgcggtggctcgcgcctgtaatcccagcattttgggaggccgaggcgggccgatcacctgaggtcaggagttcaagaccagcctggccaacatggtgaaactctgtctctactaaaaatataaaaactagccatgcgtgctggtgggcgtctacaatcccagctactcgggaggctgaggcaagagaatcgcttgagcccgcaatgacccaagatgcactccagcctgggcgacagaacaagattctgtctcaaaaaaagagaaagaaatcagacattattgtaataaagtgttatctgctactgatgtttacttctgctttaatattaaaaactctagcacaggggatgcacactactcccaggtcatcatgaaagcagtgtaccaaaaggaagagcactaaaattcttttacaacaatagctcatgctttgtttttctcaagtagtaggtattgcagagtcatcttgtcatggccatcaggttaaggtgttccttctagattctctacactcacccagggtcagctagtattgctgacagctgggggacagcgcagttaaaaatgatgatcctacacaaaacagaaagaaaaggcaagcgcctgcctttccagaaagtgaaggttatgtctaaatgtctattctgtagaaggtttaggtatatttcttttactgaagagcaaccagagtagattttgacaggttacagctaataaaggtttttctctctgaaaaggtaaaatcgttcacttcctaattatgtgcttacatgaaagcagatttaataggtctctcaactttatttatttatttatttatttattttgagacagagtctcactgtgttgcccaggctggagtgcagtagtgggatctgggctcactgcaagctccgcctcccaggttcacaccattctcctgcctcagcctccagagtagctgggactgcaggtgcctgccaccatgcccggctaatttttttgtgtttttagtagagacggtgtttcaccgtgttagccaggatggtctcgatctcctgacctcgtgatctgcccgcctcagcctcccaaagtgctgggattacaggcgtgagccactgtgcccagccctcatttcatttttaatttttctgtttatatttaatcttgnnnnnnnnnnnnnnnnnnnnagatagagttgctgacgcgtcagtcggcgtctaagagaacactagtctcaactttctacaatacagtataatatagtatgttcattgaaacaaattttattagatatttaagtaatattaaagtgactggccgggcacagtggctcacgcctgtaatcacagcactttggggggctgaggcgggtggattgcttgagctcaggagttccagaccagttttttcaatatggtgaaaccctgtctctactaaaaatacaaaaattagccaggcatggtggcacatgcttgtaatcccagctacttgggaggctgaggcaggagaatcacctgaacccaggaggcagaggttgcaatgagccgagatagcgccactgcactccagcctggcaacagagtgagtgagactctgtctccaaagaaaaaaaagaaaaaaaaaaaaagagaaagtgacatattgtcagacatgctttaaaaaaacacacccccctttttcactcccctttttatcagtactgttaatgtaagcttttatgcctggctttgcatttgccctgcaataaaataagattttataaagagacctaggctaaaacttgaattctcatgcttctgtggagcagaaaagtggcagggaatatttctttatacagttcacttttaatcattcatccaaaaaacagtttcttcccatttaaaatgcctattcatacatttgagttattccctttggattatcggaagccagattacaaaatttaggaaatgctaccaagtcctctttgaagcaacaggcacataaataatttaaaactctggaaacaatttttagaaccttaatgtgaaaaatagacttttttttaatgcatactcatttctgtcaaaggctaggctaaaagctttttgagggtcacactgcgtatgccccttcctcatatgatgggtagttttgtggacacagtaaagagttaacccagcttcctcggggacaccaggtcactctttctggacacctgccatcagttgccatgcctaacaaacccttccctggaagcagttagaacataccttgggagtcagatccatcttgggagtccagactcatactacctttttgtccttggaagtcaccaaatgaaagtaattgtgcccgatgattgagcagatattcatattgtcacactcgttccttttgtattaacttttatttacctgttaatgaaatcatcaaaatacaatgagtaggcaccttctatgtacatctgtcctagtgcttttgagtgttaatctaaactcatacatcaacaaacattctagccggacaagtaggtggctactcagtccattaagaaacttaattactagtttctagtagccttaaagtctcatttaacatttaacaaatcaaagagcatgtcagaggctggacatcaatggcagatgatgccaaagtcatagggttttgcctttgtgtacagtgcataggctccaaagcatgacctgcacgtcttgatactcaggaatttttggaaaaagaaaatcacactcttttgtccacttttaaaaagtgaaaagtagagccttcattaccctagtagagcttaacctaatacaatacaatgaaccaaacaggaagaaaggcatcttctacaaaccctattcaaaagtcattggccagctctttaaaaagtttattaataatttaaatatttaaataacttgtaggtttatccattagtctcttctattaggctctacaccgcctcttttgggacggggttagaagttccagttttacatgctgttcctcccagcaaggccccatttcttcaagtgagtacaggattgttgatagctccgtttacaaagtggaagtgatgacagctcccattgatgtggacagttctctaaacaacgcgaggtgacttcagcttatgtggctygttgcctgacctcttcttttaaggtatctctttctaattttgatcatccattttatactcagtttggcaaactctgctgctttaaataatgccaagaaggcgccacagagaagagcaattgtgttccaaggattggcagtgactatctgtgaagcaaacagaaacaaacaggattactggtttgcttcagtcttgattctttttttttttttttttttgagatggagtttcgctcttgtcacc[143 bp omitted]tgttattatcaagagcccttcccaaattattgggactataagaaaaatacctgggttctgaaactgtcataactctatatacttcattcagactatacttttaatgtccatagctcagtttgaggagaaaaatactgactcctccctataataaagtgattctgaaagaaagctgtttttcaaaaaagctctgcacaaataagataggcaatatttaattttgtggcctaatccaacaataagtgaccttgctttgagatgaatttccctaaaactatacccagtccataagaaggtgagctcctcttgttcccatctcatagttaccatagtttcaagtgtttcctcatttctagtccaatggctgtctttcctcccaaacttagaggaggattcctgcctccagtcctctgctcttttccccatctacgatgctttcctcctgtctaggtttactcatccttcaaagtctcagagctttccctgaccactaagctaaaaccctttctggacttcagcagagctatttatcctatgaatgcccttcacagttccttatggtctggaatcaataatttaaaacaataggattgttctctcactaactcttgaaggcagagttgtaactctttaaggcagagttcttatcttggatttctgacttccacaacctggtaagaatactttttttttttttttttttttgagatggagtctcactgtcgccaggctggagtgcagtggcgcgatctcagttcactgcaacctccgcctcccgggttcaatctattctcctgcctcagcctcccgagtagctgagactacaggcacatgccaccacggccggctaattttttgtatttttagtagagacggggtttcaccatgttggccaggatggtctcgatcttatgacctcgtgatccgcctgcctcagcctcccaaataaaatacttctaagctcaatttagcagggtgaccttagtatgcatttcattgttcacatatgaaaatggtgataccaccacttgactgctgtgaagctgagtaaagcatgcctcgggtactgggctccacttggcccataataggtacctcatactgaatatagtaggttaaaaaatgttttatcacacattacacaacgagctgcaagcccttctccccagtcttgattcaataagcctctgcacatccctcttcatacaaagccttgccagtccataattaatagtggtagtgggtgatagcagagcaagcacatccgtatcacagaatccccacctgggggtggaagcttacacgtttgggtctcagctatgaaacagtttcctgtaagccatgatcacatcaggatatattatgatgacatgaatgccaatcaatactagatttaggcctggctctggtggacggtgtgtcttaaatgttcctttagcaaagctgtccaattattcctccccttccaagatcatgagtcagaatttgacgttagaggaggtggagccagatggctaaagagaaccctccagcgatagtcctctgcagcaacaccaaactcagctatccatgtaagaaagtatctacacaagagccaaaaaaccaggtgagagatcacagtatctggtttagtataataacaggaaaagacacactgaagaagagtagaaaggagggtctcacgctgcctacacacccctcccccaaccttaggcagtgcagcagagagaatctgtgagcttgggagagggaagtgagtctggaacttgcattggaacttcacaagggaaaacagcaccaggcagaattctgaggccctgattccaggctagagcccgtgaaaagagtattaggcccaccccagatcagaggggcatctaccaccccagtgggaggaaaccaagtctgggcccactttacaatagactaaagtggccttaggccccaaataatttcagtggcagccaggccatagcaaccacagctctgatactgcactggtctgggagtctgtgggtttggggtgtgatccagcatgacaccagctgcctcaactccaggcagtgcagcatggtggaacactcctgcttgggcaaaggagagggaagagtatgagggactttgccttggaacctagt

SEQ ID NO: 95851 - DNA, 21699 bp, Homo sapiens
actataaccagctgaagaagcaggagctgcagccaggcacagcctataagtttcgtgttgccggaatcaatgcctgtggccgggggcccttcagcgaaatctcagcctttaagacgtgcctgcctggtttcccaggggccccttgtgccattaaaatcagcaaagtgagtcttgctgtggggtggccgtctgtccctggttggtttctgcctgcctcagcacatgaggtggccgggggggggcataggagagctaggttttgagtcccagtttgtcttagtccttccacttgggggaagatctctttgaagctccttgaactaccacatggaatatctctactgtgttagaaaatggcttatgggaaccatgattagtcagttctggaagcctctagcctgttctgttgaccttctgaccccctggcttctagagtccggatggtgctcacctcacctgggagccaccctctgtgacctccggcaagattatcgagtactccgtgtacctggccatccagagctcacaggctgggggcgagctcaagagctccaccccggcccagctggccttcatgcgggtgtactgygggcccagcccctcctgcctggtgcagtcctccagcctttccaacgcccacatcgactacaccaccaagcccgccatcatcttccgcatcgccgcccgcaatgagaagggctatggcccggccacacaagtgaggtggctgcagggtgagtgtccttcgtggagctcttcaggcacagggaaggcccaggaagccgggtgcagcaggaggaactgtcaccatctgagattttttcccatgtgcggcgtctccctgcttcctttggcgcgcacacagccccccacgggggtggccatcaagtagagcaggggacccagctccgggcctgggggtgcaggggacgccaccccaggatgtttgaggggacaagcagtgagagggctggcgggaaagtgtaggtttccaggcccgaaaacagcacgtcccaggtccctggagtgcagcaggtgagggatggaggccagcctgcctcctgtcaggtcatgctcctgctccagctcccctggggctctgggacctgggagggcagtgagaggtgggagctgagctgagtgggtttctaacctacgtccagaggggagtgagtggtgtcgtgttctggtcccaaggagtggcgtaaaaggtgaccacccatagggcaggcgccccacccttgccagctgcgggtcatgccatgtggcaccaagagactctgcaggcgggcagggcgcatgtgttccttgctctcgttctgtcacaatgctsstcacgcatctctcccgttccttccagaaaccagtaaagacagctctggcaccaagccagccaacaagcggcccatgtcctctccagaaatgtaagcaggaagcccctctcgggaaccttctgagactaggggtggaaatagctgggttcagcctcttgtcaaatgactgggggcccctaaccggccctgcaccagcagggcctccagtggtgcagggcccacactaactttctctttcctttttctgccttccaaggaaatctgctccaaagaaatctaaggccgatggtcagtgagaggaagctgactagcccctggattcttctccagacccccctgcttcaggaacacccgccagggcccacccctcccaccccgtcccagcattcgcacttcaccctcgcgagccgctgttcactcctctcccctttctctttctctctgtttttaaaataatctaaagaaagcacattttaccattgctgttgggaggaagcagaggcagatgggaaagcagagagaggagcgcgcttcctttcctccccgctgccgcccaccctggggagagacttttgcggggagggaaggcggagctgaggacagccagctccccctcccaaggctgtgcgttcctgagggccaggtcgggggcaggcatggaggggaggaaaggcgtccctcttggccctccccagagtggctttcctggcaccctggcctgggtgtctggttctgttttcttttcttccccttgtgtttccagtcacctaacttcccttcctcaggctcccccggcccaccctgctcagtgaccccacaggaagcttacacattttctcagaggcctttgtgctcccacctcttctaccctccccctcttctttcccattttaaaaaagaaaagaaggaaaaagaaaaaaggggcaaggagccccgcggcggcctgggcagcgcctgtgcagacctccctgcaggccgcactgccaactgctgcatttgttgtgytttttaggttgcaattggtgaagttcacactttcattgtaattttagcgtgtggggttttgtcccttttttgttgttgttagctgtgtacagaatgtgtaatcttttttcttttctcttttttttgttttgttttgttttgtttttgtttttttacttttttcttcttggctaattcttggcagggatctttctggaggaaaagctggggccagccagggcaggagaggtgtgaaatctgccacgaggggcctgctgtttgccacccagcccaacttcctgttgctggcccctgccctctgcccttttgcctgtcctcaggccgctggaacaaaggaaggacagctcattcctcatgggcgatcactccgcatctatagggtcgagcctaggggagcttgagggagggctggggcctccttgtcctggatttccagctctccccatgccccctccctgagcaccaccggcaccgcctcccaaacagggctgctggtttccgcagccactgctccacctcccccaaatcgtcatggaaagggtggagaatggaggggaaccaggygtccttggaggcagcttgggagggtgactgtgtagtgtcacccacaagggaggctagggcaatggagcaggccaccagcagcagctgtgcagcatggaactcaggccaggctccgaggctgggggatctgcttggagttttctgccccccaccccaaacttctgtcgaggagcaaggcttgccagcaagtcagaaggatttgaaccgagcagccaatctttccagccctcccctaccgacctctgcctggagacgcagcagcctgtgtcctccagggcctctggtttgttgtattatagtatatttcgctgtggaaaatgtcacgtttagtcaccttggagcccactcacctggtcctgttgttttaccccatyccttctctcgcgcgcctattgatttgtttctgaggagagtacaccgttcactattgtagagtaacccctgtgactcaatattaccatagtgcgatgtcgttttgtgctattttgaacaattaaaagactttttttgaaataaccactaggtgtctcactgtgtcccggcatcctctcaggaagcctgagcgggaaggctgagacctgcccgaggctcacgggagccccctggagggagacctgagctctggtgaaagcgtagaaggccccagagtgaggcctctgctgtggcctccggtctttggaccaagtcggaccagggtccagcaggttrcttggtagctgccttgcagggcaagggccaaagagccccttgggcagctgctgctgacttcctgtgtctggggcccagatctccctccctcccctcctgcactagaggataggatggggcaagggcctggcaggtcaccagcggcagcctccttgggtgggttggggggaggtgggctgagtcaagtacaccacgggtactgcagaggtggatcccttcctctggcttcctcttaaatgtgagccatgcccccaagggaagaagcaagagcttgtgatccagactgaccacctagcagctgggtcggtaggacagctgggatcccgtgggctgaatttgtaccaggaggcccagaaagctccggggcaaggtggccggagcagcacaggcctaggcgggtctgaggggagtgacaccctgcttctggggcctggtgctcctggcgcacctgcattccccgccccctccaagcccctgccgcctgcctttgtttcccctacacacctctactgcccagccttcctctcagagcacccaggcactccgctaccagaagctcctggagtaaccaaagcctccgtgtctccacctgtggcatgggtgtgtgtgcaaggccctgtcgaatgcgacctcttctgggaagcctctgtcctgtggggtctgctgtgtcatgtgggggtggggggaagcagactggccagggcttgacaccaggagccatggctctgtcttacccaccgcaccaactgtgacctgccttggagcctagcctcgcagaggcccaaggagaggggtgggaaagtgtccttcagagcagagcggtaggagtcatggctggggctggtggaggccaggggccacatggggctggccccagaaccgaggggccttgcggatttgccatacctttggcaaatggcgttgtgggcgcttcgcctggtgggggtggtacaaggcttcttcctaccccacttctgtagctggcacctgtggggctacccaccctccgcattccttcagctcacttgtctcaccgcggctgcatcacactccacaaggcaagggccacatcagtcatgcctctggtgtttatctgaaaataccgcgtttccgtctgagggcaccactcagtctggggaggcaggagggaggctggacatgaaygtgaacatgacaggcctgtgagcagggcaggtagatacagcccggctgggcacaaagctcatcccctgagcatgagccgaggccgagggtgggtgggagcacacagaggatgcctccccagctgccaggggcatcagcctcattaccaagcaccccaaaggggaactgtttggggttgggtgggtcagcctgcagcagggactgagacagccactgtggcatcaaagaccagcagtgcagtaccacgcccagaggctggaaccattttgtgcactgttggcctggaaggtaggaaccacctcagcccagctgccttgtagcatcatcgggtcagtcatagagctacagacagatctgggcagctggaaaacaggcccagagaaggggggtgtgggctgttacctgcagttactgtctggccttagagctgtgtcacttgtgtaaagaagtcagtgccaaggccgagcgcggtggctcacacctgtaataccaacactttgggaggccgaggcaggtggatcacgaggtcaagaatttgagaccagcctggccaacatggtgaaaaaccgtctactaaaaaaaaaaaaaaaaaaaaaaaaaaaattagctaggcatggtggcaggcacctgtaatcccagctactccagaggccgaggcaggagaattgcttaaacccgggaagcggaggttatagtgagccaagatcatgccactgcactccagcctgggcgacagagcaagaccccatcttgggaaaaaaaaaaaaaaattagcgccaatggctgcccattactgactgttgaggtagttggtgacaaactgattcaaaagagaggacttgctaggctgggtgcggtggctcacgcctgtaatcccagcactttgggaggctgacgcaggaggatcgcttgagcttaggagttcgagaccagcctgggcaacattgcaaaaccctgtctccactaaaaatacaaaaattagccaggcatggtggcccacacctgtggtcccacctactcaggaggctgaggtgggaggatcgcttgagcctggcaggtcaaggctgcagtgagctgcctgggcgacaggacactgtctcaaaaaacaaagaaacaaacaacaacaacaacaacaaaaacagaacttgcctcctgtctaccctgtgtggtgacaggtcagagggacctctgcattcaggcccactagctgttccctgtcctgctgcacccctgccccacaggcttggtagggccaaggccctcagccgccctgccggggcccctggtgtagggcggggtgggtggcagccccgttccccctcatcccagaccctccggccatcccagcttttcccaccaagcaggatcttgagaccagagctcccagcaggggccctggagggactggcccattcgagtggagggtcgcggcaggaacaagtgcgggggcctcaaagccccgccccaggcccagcggaaccctgaagaggagggggagggtgagccgggcgcggctgtgtcagctgagtgacagtcacgggaccgcgaccaactctgtctggcttcctagaggagcaggagggatgagcaagggtctcccagcgcgacaggccagtggtggggtgcttggggggagtgctgtcttggagggtcccggggatggtgacgtctgaagccccgtgcagaggtggggagatccctgagggctggttcccgaggctgggggggcctaggtcccatgtgggggctgcgccttcaagccccatttcccctaggacatggagaaagagcgagagactctgcaggcctggaaggagcgcgtggggcaggagctggaccgcgtggtggctttctggatggagcactcccacgaccaggagcacgggtactcggcgtgcttctggagtcctcagcagggtttttgcccttcctgaggccccttctcactctcaggcacctcacagatttgctggccccagaggggcaggaggggctggcaaggcccgttccagactttgctaaccctgccttcccacaggggcttcttcacgtgccttggccgcgaggggcgggtgtatgatgacctcaagtatgtgtggctgcaggggaggcaggtatggtgttcccagcctggaagctcaggcacacggcccatcgcctcaaaggtctccccacctcaccccagccggccacttaagccactttccctcccgtaccccgcaggtatggatgtattgtcgcctgtaccgcactttcgagcgcttccgccatgctcagcttctggacgcagcaaaagcaggtaggtgcccccttcctgcccatctcccagtgactccgtccatgtttactcaacagggcacatgtgcggagttcctagagggatctagaagcagygaaggacttggggaggctcaagggtggtgtgtgcggggcgtcctggccttacccctggcatgccaaccccccaacctccaggtggtgagttcttgctgcrgtatgcccgggtggcacctcctggcaagaagtgtgcctttgtgctgactcgggacggccgcccggtcaaggtgcagcgaaccatcttcagtgagtgtttctacaccatggccatgaacgagctgtggagagccacaggggaagtgcggtaccaggtgtgtgagaggagggtgcccctgaagaccccaccctgcgaccctgccatggccacctgatgcattcccactcactaygcaagtcccctcccatggacccatctgtgggccaagtccccttcacctctgaacgctcccctacccccacaggggcgcagacggagagggccctatccacgccctgcccccaactgggaaaaggcccttccctcctccctgggctccctgtgctgccagaccctgaccccacagcctggaaggggctgcacccccagactgggagcagagtggggcggatctgactggcccctactggacgctgggtgccaggccccaagtaggccctggatgaaggtgtctctgggttcaggagaggaattggctctcccaccccagggccgtgtccagggggatggcacaggatgtagcctcagcctgggcctccccttgcctcctgcacccccagacggaagcggtggagatgatggatcagatcgtccactgggtgcaggaggacgcgtcgggactgggccggccccagctccagggggccccggctgcggagcccatggcggtgcccatgatgctactgaacctggtggagcagctcggggaggcagatgaggagctggcgggcaaatacgcagagctgggggactggtgcgcccggaggattctgcagcacgtgcaggtgggggatgcctggggagctggggtggtgggaggccttccactcccccactcccctgggcaccctggggctcgacacacctggagagacagagattcggggatgtccccacctggggaaggtggagggcctgagggctggagggaggatgcggagccccaggcaagccctgacagaaggagacccctcctgccccacccaagtcccttccaggcctctgggccgtgaaacccgccctgtctgtccccattcaatgtttcaccctcccctgctggagaggatcaggccagaagtgaggattacatcttcctaggcccgggctggacgcggtggctcgtgcctgtaatcccagcagtttgggaggctgaggcgggcggatcacytgaggtcaggagttggagaccagcctggccaatatagtgaaaccccgtctctactaaaaatacaaaaattagctgggcatggtggtgcatgcctgtaatcccagcctctagggaggctgaggcaggagaatcgcatgaacccaggaggtggagattgtagtgagtcgagattgcggccactgcactttagcctgggtgacagagcaagactctgtctaaaaaaaaaaaaaaaaaaaaaaaacaacaacttgctaggcccaagggagtgaatcagcccctccttaaatgcccctctgagcctggcccacccaagccagcaggtccaggggcttgggtaagagggagggaggaagggctttccggagctgggtctttctagytgggtggctgggtgggtgaaagggctggaggcaacattcccttctgctccttcccggtagagggatggacaagctgtgctggagaatgtgtcagagggtggcaaggaacttcctggctgcctggggagacagcagaacccaggtgaggggcggggtgggctgggggccacccaggaggaggggagcgctgagccttgtgttctgggcttcagatatgggagtgcctggcgggggcgccttgaggaggcagaggagcgaggatgggcttcccaaggctgggggtttctgcagaggagcaggcttccagggccagggagctcagagcctcgctcattgttagggagggagcagagaggtgccaggggcttttgctccctctgttccctccctcaaccccaccccccgccccccgcccttccgtactccacccctcaccaggccacacgctggaagccggctggtttctgctccgtcattgcattcggaaaggcgaccccgaacttcgagcccacgtgattgrcaagttcctattgttgcccttccactccggatgggaccctgaccacggaggcctcttttacttccaggatgctgataacttctgccccacccaggtgggagagcgcccagggccatgtgtgacccacgctgttctaaggctttctgcccagggaggtggttgcttctctagagggtaacctggggctggattggaacctagaggcctgctctcagcttctgtgccagtgttacaggaaaggggtcgtgatccagaccccagaagagggagggttcttggatcttgcccaagaaagaattcagggcgagtccgcaatgcaaagtgaaagcaagtttattaagaaagtaaaggaataaaagaatggttactccataggcagagcagccctgagggctgctggttgccttttttttttttttttttttttttttgaggtggagttttgctcttgctgcccaggctggagtgcaatggcgccatctcggctcaccacaacctctgcttcccgggttcaagcgattctcctgccctagcctcccgagtagctaggattacaggcatgggccaccatgcctggctaattttgtatttttagtagagacggggtttctccatgttggtcaggctggtctcgaactcccgacctcaggtgatccgcccgcctcagcctcccaaagtgctgggattataggcgtgagccaccgcacccggctggttgcccatttttatgcttatttcttgatgatatgctaaacaaggggtggattattcatgcctcccctttttagaccatatagggtaacttcctgacgttgccatggcatttgtaaactgttggaagtgaggacgagcagaggtcactgttgtcgccaccttggttttggtgggttttggccggctcctttactgcaacctgttttatcagcaaggtctttatgacctgtattttgtgccgacctcatatctcatcctgcgacttagaatgcctcagccgtctgggaatgcagcccagtaggtctcagcctcatttgacccagctcctgtttaagatggagttgctctggtttacacacctctgacaccatgtcatatggaggccaccagggagctggcgaaacgctgatgctcagacatatatgccattcgtctggggccctggtgtctattcaagaatctacaggtcaggaagctgatatcactgggaggggtccttcagaacttccaaagatgtcccgcaattcacctccagtagcttgggccaatggagacgcagccaggtctggaaagttgcggaggggagtttcctgctgagatgcctgcccctgctctcccctcagctggagtgggccatgaagctctggtggccacacagtgaagccatgattgccttcctcatgggttacagtgacagtggggaccctgtgctgctgcgcctcttctaccaagtggctgagtacaccttccgccaggtgagagctgcctccttgtcccctctagaggctgaatgggggaatggggggagtctggcccggctgcgctcttgccccctcgctgagcacagtcgctcagctggtctgagagtttccggagccccagtgctgttcgttcagtcaacgaagaagcctctgccctcctagagctcgaattttggtgktgggggcgggaggagcagagtgtaagcaagcagacctaggtggtggtgagagtgacagctgtgggaataataccactggagagggttgtgggggggctctttcctatggggtggcagcagggaagcactgagcaggggccgagtcaatcaggggtgtgtctgagggactgggagtctgggcagggtggggcatgtggcacagcaggggggcctggcagcccgggaggataaaggcagagtgggcaagggacggactccagctgcctggtctgattccattgttacctgggtcctggggcttggaggggagggtgttatgggggaagtctgtagggaacagggcagaagctgggacagcagaggaagctgtagctgtcatcccagccagtgagggctggcccaggtgggagctggtggggacagagggttcacagtctggtggagcagcagtgggattcctgagtctccagttcagacggagagatctggactcaccatgaatgttttcagtatcacaagaatgtagatgctgcctggcacagtggctcatgtctataatcctagcactttggcaggctgagacgggaggatcgcttgaaccgaggacttcaaaaccagtctgggcaacataacgagacctggtctctacaaaaaattttaaaaaattagctgggtgtcatgcacacctgtagtcctagctactcaggaggctgaggcaggaggactgcttaagcccagtttgaggctgcaatgagttatgatcacaccactgcactccagcctgggctgggcaacagagcgagactatgtctcaaaaaaaaaaggccgggcacggtggctcacgcctgtaatcccagcactttgggagactgaggcaggtggatcacctgaggtcaggagttcaagaccagcctggccaacatggtgaaaccccatctctactaaaaatacaaaaattagccaagcgtggtggtgggtgcctgtaatcccagctacttgggaggcagaggcaggagaatcgcttgaacccaggaggcagaggttgcagtgagccgagatcgcaccattgcactccagcctgggggacaagagcaagacttggtctcaaaaaaaaaaaaaacaaaaaaaaaaaaacagtacagatgctgctgagatctatgaggcaaaaagggaaatgggggcccagcaaaggagacaagaatcagtggtgacgcaggaagaaaaccaagccaggggctccctgaagcccaagtgctaggagcagagtgataagctgtcttgactgctgcccaggaggcaactcgagctgctgaacacaggaaagggcatggcacccagtggaaagggcatggcacccagtggaaagggcatggcacccagtggtggcaaggcctgggtggtgaatgaatgaagattcatcatgcgtttctaaagccacgactccgactccactggtgaaccctggtactgcgaggactatagcaggggatcttattctggggtctgtgagcttcgaaaccgggggcggagaatcacatctttatttgtactaacctctaactgaaactagcatttgctgccattatgagtggaggcaatgaaccacattggtaatagaagtgcctggctttgtcaccgatagaaatccagatgtgtttacattgcattgcagttagagagacatctgcaagtatcacatatattcgtcactacttccaaagcagcagggttgttagacctgcagctatatcttaatatttaatgcattcatagagtgtgtgttaggggccaccagttctaactcaaaaatgaaattgaaggaatacattttaataagatatagatgacattaaacaattacaaaagttataatcaacaggtaaatcggctgggcatggtggctcatgcctgtaatctcagcactttgggagactgaggcgggtggatcacctgaggtcaggagttctggaccagcctggycaacatggcgaaaccccgtctctactaaaaatacaaaaattgggctggtcgcggtggctcacgcctgccattccagcactttgaaaggccgaggcaggtggatcacttgaggtcaggagttcgagaacagcctggctgacatggtgaaacccccatctctattaaaaatacaaaaaattagccgggtgtggtggcgggtgcctgtaatcccaactactggggagactgaggcaggagaatcacttgaacccgggaagcactccagcctgggcaacaggagcaaaactccattaaaaaaaataaaaaataaaaaaaataaataaataaattagccgggcttggtggcgggtgcctgtaatcccagctactcaggaggctgaagcaggagaatcactggaacctgggaggtgaaggttgcagtgagctgggatcacgccactgcactccatccagtctgggtgacaagagcgaaactccgtcttaaaaaaacaaaaaccaaaaaactaaccaacaaacaaaaaaacaggtaagtcattatgcatcaaccaacataacagaatacagaaggcaaaaatccagacattgaaggaaattcttctttaccttcctgtgtcatgtcaagcagtcaaaaaataagtaaggacttgaacaatgtaactcaaaagacagaatgaatacacacagaactagtttttwtttatttatttatttatttatttatttatttatttatttatttttgagacagggtctctatcgcccaggctgagtgcagtggcacaatcatggctcagtgcagcctcaacctcctgggctcaagcgatccttccacctcagccacccaggtagctgggactacagctgtgtgccatcacgcccagctaattctttaattttttttttgtatagatggggtctcactatgtttcccagcctggtcttaaactcctggcctcaagtgatcctcccgcctcggcctctcaaagtgctgggattataggcgtgagccactgtgcccagcccaggactagttttacttcctacaaagaagaatacaccaactcttatgggccaccatttaaagagacattttcatagtggacttcaatgtaattgagtccatgatccttttgagaaggggctgaactgacaagcctccctgagacaggtgccccatggaatgctagtggagagagaaggaaagagagtggaatgggcactgggcaggggcagagggaggaggagatgagtttgggaccaatggtgagccaggacaggagtcagatgagattgtgcatctactggaagacaggcctgtgaagccgggaatgggagctccaagggagtcacttcttaagagtttcatgacaggtcgtcgcctccatcagggttctttgtttcttttcttttcctttttttttttttttttttgagacggagtctggctctgttgcccaggctggagtgcagtggcgcgatcttggctcactgcaagctccgcctcccgggttcacgccattctcctgcctcagcctcccgagtagctgggactacaggtgcccgccaccactcccggctaattttttgtattttagtagagacgggatttcactgtgttagccaggatggtctcgatctcctgaccttgtgatccgcccgcctcggcctcccaaagtgctgggattacaggtgtgagcctttgcacccggccgggttctttgtttctttgaatcaacgtaaccacgactacaatcacaatagagaacttttttgtttgtttgtttgttcgtttgtttgtttgtttgagatggagtctcgctctgtcacccaggctggagcgcaatggcgtgatctcagctcactgcaacctccgcctcctgtgttcaagctattctcccgcctcagcctcccgagtatactgctgggattacaagtgcgtgccaccacgtccggctaattttgtatttttagtagagatgaggtttcaccatgttgtccaggctgatcttgaactcctgacctcaggtgatccgcccgcctcggcctccgaaagtgctgggattacaggcgcaagccacagctcccggcccgatagacaacgtttctacaccccagggcagagttctttcattccatctagcagtgtctcatccccttgcccagtcggttatatagttgtagcctgcctgctgcgcccacccctgctttcatctttgtggaggacgcagtgtcgcggttaagatcgctggttctggagccacgtcacctggggtcaacccaggctctgacccctggtagcgatgcagtggcatctgggcgggtcctgcaggcgctagctgtcactgtctctgttattccagtttcgcgatcccgagtacggggaatggtttggctacctgagccgagagggcaaggtggccctctccatcaagggaggtcctttcaaaggtgagtgggggagagggcggggccgcaggggttgcgcctctcggctgcccccggccctcactacctgcccgcctctacccgcaggctgcttccacgtgccgcggtgcctagccatgtgcgaggagatgctgggcgccctgctgagccgccccgcccccgccccctcccccgcccccacccccgcctgccgaggcgcggaataaaggctgagtccgctccacctgcggctgtgcgcgcgtctgtgggctcgcgggaggggggctgtcgcgccgagggaggggccggctccagctccggggcagcgcccgccccgcccccaggcccgccccgcgctgaccggctccgcgcattggcccgccccgtgcgctggcctgtcccgcgcattggccaagcggccgggaggacgggcccggcggccgtgcacttccggccggtggccggcccggcgcgcaccgccccttccgccgtcgcccagcgagcccagctccggtcccagccccggccgtcccggcgtcgcttcggagcgcggcggcagctgactgcgccttcacgatccgctgggacccgcgagccccgccgccgttatgaacatccgcaatgcgagggtgagcgcccggggcgggaggctgtccgcgccgcgtgggcgccgggccgggtggctgccgcgcatgctcccgagggccccggccgagcccggcccggtggccctgagtgtgcctgcggccgctggacctatggggctggcccagcccgccgaagaggccggggcgcggggccggggctgcgattccctcctgtttgcgtgatgtcgggcctccgttgggtgggctccggggacctccggggcgcccactcctgttcctgtgctccgggcgttgtgcaaagtcagatcgtcacagtgcctgcccagccccgagggagcggggccgagcagaccgacggggagcaggcttctcacccgtggtcaccgccgccttagactgagcgcgttccactgccctccttccctgcagccagaggacctaatgaacatgcagcactgcaacctcctctgcctgcccgagaactaccagatgaaatactacttctaccatggcctttcctggccccaggtgggcagcttctgaatttgggcatgggggaaagcaggccgaggaaaatcccatctggccatcttggagggagtggacaagtctgtcagagcccagggggctgtatggtcggtggcgtcctgggtgttttcagctggcagacaggggcaaaggaaaagaaggcgcccgaagggagcagagaataggggcaggatccccactttgcgtcttctttctgggtatgggcagggcacagtgtggcgagggggagaccaagccactcagcccggaggtcatgagccatcacacaactcgccactcgtccagtttgtgtccctctaaagggctcttctagctccgacaagaagttttctcactctgttttcctgtcaccagctctcttacattgctgaggacgagaatgggaagattgtggggtatgtcctggccaaaatgtgagtcaccaaggaggaagacagaagctacacgtgtctggtggatgcctctgtgggctttaaaaaaaatgaataggcttcttcttttcagtacagttgaaagtttatagaaaaattgaacagaaaggacatggagttcttatagcacccctcagcatcccctccctgccagcttcctctgttagtagcatgttggatttgtgtggtccacttgtgacaagtgataaatgaatgtgatatgttactattattattattactattattatttgagacggagtcttgccctgtcgcccaggctggagtgcagtcgcgtgatcttggctcactgcaacctccaccccctgggttcaagcgattctcctgcctcagcctccttagtagctgggattacaggcacatgccaccacacctggctaatttttgtatatttcagtagcaatggggtttcactacgttggccaggctggtctcgaattcctgacctcaggtgtttccacccacctctgtctcccaaagtgctaggattacaggcgtgagccactgcgcctggccgatatattattattaactaaacccatagtttacattactgcacttctctttgtgttgtaagccccatggttttgaccaaatgacatgtgtccaccttcatattatcgcaggatagtttcactgtgttccacgcattcatccctccctctccttaacccgtggcaaccactgattttttactgtttgcatggttttgccttttccaggatgtcacagagttggaatcatactatatacagctttttcaggctggctttttttcacttagtaatacacatttaagcttctgccttgtctttgcgtgggttgacagctcatttctttttttattttttgagacagggtctcgctctgttgcccaggctggagtgcagtggcatgatcatggctcactgcagcctcaacctcccaggctcaagtgatcctctcatgtctgcctcccaagtagctgggaccacaggcatgcgccaccacatccagctaattttttgattttttttttgtagagacaaaaaaaagtgttgtccaggctggtctcgaactcctgggctcaagcagtcctcttgccccggcctgccaagtagctggaactataggcgtgtgccccacacccggcaggcttggggttttcaggcagcagagggtggcaggatcggctgctctgatccaagaggctcccggctctcccccagctggggtcttagggggctgtagtgcatgtccactctacaaatggcaggggggctggaggtggctgtgcctacactgagctcctttgcagcctctcctttctccctctccagggaagaggacccagatgatgtgccccatggacatatcacctcattggtatgtaaggtccacccaggctctctggtgggggtggaagtgggggttagttggggcagccctcaaggtcccagtccctcaccccatctctgctcttctcccaccaggctgtgaagcgttcccaccggcgcctcggtctggctcagaaactgatggaccaggcctctcgagccatgatagagaacttcaatgccaaatatgtctccctgcatgtcaggaagaggtggaagccgggctgagggaagggggattgagggggagagatactgccttgacgggggtcctggggtacctcagcttttggtgaagatccaggaagtgggattggggggaaggagggaccaggaggaggggcaagacctggacgtgctacccctccctggccaaatccgtgcagctcagcagtgccttgttcccctgcagtaaccgggccgccctgcacctctattccaacaccctcaactttcagtaagtagatctcgatttttctaatgggctggggttgatcccaggtctggcccatcagggcacctgagaccggctgagttgccttccaggtcgggggtgggccggctgtggggaagaggctgtggaccccagcactgccaggatacctccacattcactcggcggctgatggttgaaaagccggcatggagacagcacctgcctgctgaaacgtgctccatgtgttgtgatggaggagctctggcccatgatggctgaggctggcgaagggcacacgggctgtttagtaatgtttgggaatagagaggtgtgggtccctggcgtgagcagatgctgaggagcaggactcaagcatgaccaagcacctagaagaatccaagagagagcagaatcgaggagaatgcacattcaggaaggaagggccagtggccaggcagcctagtggatgggggaggtctgcctgaggaccaggaggccccgtgtgcctagcacactagagagaacctggcagttggcatgcccagtagacagtggaaaaaagtgcttgcaagtgaagctggggtgggctgcctgtggagggacactaactgcactcagcccgtttggtaggggatgaagaagagggactgttgggaagggcggtggcctctgggctggatgctggcaagagggatctgtgacccagatgacgatgtctggtgggaattgctttatagctaagtcagcaatcctcatgtcttaggcctggcagggccagcctaggccattgagtccagctccccttccagggacatggccacgcgagtctgcacacacacctgcccagtgtagtcacggccccagagctgctcaggcagggctcaccgtctttcctgggttctgatggctgttgtgaggcagctcagtaagggacagggcgcagggcagggagggaaggggaaggctgaattcagggcttcagctcacaagaaaccgcagaaatggatccttagtatccaggctaaggacacagaacgggggcaggacgggtggggcgggccgctgtgtcctggagcctttgctggagagaacagagggcaggtcacactggacttgttgtctcaggatggagccttcagggagaaaacatggcaccttgctccagtagccacgataccaggagtggaggagggtgtccccgggatacaggtcttcctccttgctctctaaccctctgcccccaggatcagtgaagtggagcccaaatactatgcagatggggaggacgcctatgccatgaagcgggacctcactcagatggccgacgaggtaagcgcctgcatgaagccaagcaaggcgagcgggggcggcactcaggagccccaagacagtggctgcaggcgagaccgactttggatgccagctcttgtggctacgttgccaggagtcacgacctcagtttcctaggctgggctttagaggaggccatctgcctagcagcctggagggtgatgggagaggcagagggaggaggcttttagaagggaagtggggaggtctagggaccagtgggtggcctgcctgctcaaaggtagttctgagtcagggttctgcccaaggctcatcgggtggcagggctggtcaaggggcagcgctctgtcgtgggggcctccatggtagtcggtaagcccaggtagcggtggactggggctccagccaggtgtccccactcagtcccgcgtgtcctgcctagccctgctgcctcactatgcccctctcctcagccagcgacagggccaggctccctttgtctggaaacttaggccctgtctctttgcccccgcttctccctgggttcctggtggcagctgaggcggcacctggagctgaaagagaagggcaggcacgtggtgctgggtgccatcgagaacaaggtggagagcaaaggcaattcacctccgagctcaggagaggcctgtcgcgaggagaagggcctggctgccgaggatagtggtggggacagcaaggacctcagcgaggtcagcgagaccacagagagcacagatgtcaaggacagctcagaggcctccgactcagcctcctagagcctgccccatcccctcctcaccccacgagctttcacaataaattcgctccgtggcactggggaactttgtgtgtgagcgcgcgcacatttagagggtgtgtttctccaggtcctctggtggggatgtgagccttggccttttgacccagagcatcctgccaggcccgagtacaaggaaagagctttggaggtgggactccctagtctcatgaccttcagcagctgtggccccggggaaggaggccctggacttatgggagagaccctgccttggaggtctgcttggccacgctgaatgtgttttgtggcacaagccggggctgctcaggctcaaagctcaacagcagggctcccactcttggtggccttcagttctcttcccaccttcaccttcagactttctctccctaatcacacctgcttcgggctacagcagctccccagcatacccgtgggctccagatgtggacatccaactgctcattgggcttatctacaaatgtcctgtctgagtaatgacccagccagatgccccatcaacagtccttgagtcctccctcccctgccaccctaatggtcagtgagtccatgatacctcttgagtctactccctaacctgagtttgcatttgaaaataatttatttttagtacaattccccgcgtttccccattgacattttgtattagttggtgtatttgttattgttgatgcgcs

SEQ ID NO: 95852 - DNA, 20846 bp, Homo sapiens
ctcagatgccaaggagccagcctcagcaccagccatctgtgacacctccctctggctgggctcaccactgcagcgggtagcacaagaaaggcagcagccctgcggcttctgcttggaccctctagagacgggacgcacacccctccaggaagccagtctcaagctggctgccctgccgactgggaagtccacctaggctcatggtcctggggatcccatcctcagcctcccctgctttcccctttagggctgagaagaacaggcagccatggtcctcatggctctggccagctctccaaccacgcgtcctgagagctgagccttacaggctgacagactggaccctgggtcaccctcatggtcccagcccatgtcagccacagccgtccttcttggagctcaaaaggcagtgaagaacgagtctcaggccctgctccaggtggtgacagcagtggccaggactgatgactaactcccagagccgcctgtgtgcaccctccttttctctgtataacactgacatggcagtgggcatgcagtgtgcagtggtggaagggagatggctgtggagatggttaccctgtcgttgcaggcagggcagtaagaagccctggaaggggctcagtgacctgccacagcctcccaccttgaaggccaggctgcatgcctgaccccacacaaggagccttggctgtccccttcccatccatggcatctctcaggcagaggcccactggccctctccgcgtggatgcggttgatccctgggacgtggctgccacctttctcaccttccccctcctctccaccttctctctgcccaggagccggccccgaggtgtgggcaggtcacgtggcaccgcatctgcactgctctcctctctggggcyctcgggacccaaatcagccaccgatgtgggaagcaggtactgaggggtaatagccgctctctaaatttagacgggagaactccccagagagctggcagaaatatcccgagccttcctgtggcgaggctctcaggcaggagaatgaagagggggcagcgagaacccggggatggggggcagcagggctaagagaaggtgacagaggagaaggcccacacctgggctggggtgcacatgctctggaccacagccttgaactccaccctggtgggggcggcccacattcaaggacaggccagctcttctctgcaattccggtcgcacccatggctctccagcacccttctgcaaccaggagggagctgcctccttccttgctctggccgggtgggtggcttgccaggtgactgaggcctgagccagcagctcccctcctgcctgtcccccagcctataagaaagagccactcaagggcagaggcagttccctgcggaggggcgccctggccatggggccctggctgctagtctgtggacctgagcacatagcccggtcaccgcccccgcattccatacttcagcatcctcatccagaagcaaacaagaagtgcagcaaacagcatggcttgtcctcacggtcacggcaccagtggtgggagggaggagaccctcatctgtccctggagctgctgtcaccattacccaaggggcctgcacacaaggtggaagcttcaggacagctgtgcttccaagggtggcccacgcggcgcccctgtcctggaggccacaagtctccatcagctgggactccttgcctggaaggtgactcgtggcacccacagctgtgattctgtctccagctgtgcccctgatcgctgcagggccttgggcaagtggcagcggtgggcaggagaggtgctgggtgctcccagatgccagagcagcaaggggctcagcagcctgagggtggggatgggtctgggtgcaggaagccaatggggcccaccaggctgggcctttcggtgctgggaggagatggggagtggtggagggaggcagccagacaagccaacaggtgctgtgaccgagcgcgcaggggcagaggcccccgaggagtgagatgagaaaaacccacagcctccaggagccgctctccacccccacagacatctgagccagggcaagcgctcgccacaagcccctgcctgggcctggccatggctgcctgtctcgtgtcttatcttgttacctgtggtgagacaccctgactggagaagcatgttcctggaagggggrcggggtgggggatgctgaaatgcggccagaaaggcaggtgggcctttcctcctgggccaggcggggcaaaggttggggggatctgcagcaggggagccaggtggactgggaacatccttggcacccccaatctccccagacccatcgtttcacccttggtggctcccctctctcctggttcccttagccctggacgtccctgggccacgcgggaaagtcacctgctgccctctctcctcctcttcccctgcatggggtctggacagaggctccttgtctcccctcacttcccttcccctgtctagcccagggctgtgggtggctggctgtcccggtaaaaggattatatcatctgtaatgtatatccagacgcacatgcactgctgctcgggaggacaagacaaggagagggagccagtgcagctggccagaggggaattgtattgaacctgaacctgagccctccccaaatgggggtggtaatggctcaccaggtcccggcccgcagaaatcaatcgctgcacaggctggcgctctgtgctctacccccctcccttccctctcacctacctcctgtccctccctggtgctcacacccctgggcactcagctgcccggctggcctgcctttgacctcgtctgcaagtgacatttcagagccattttgtttcaaatgtctgggcagggctcctttgggagcggctgcagacaggtagggtgcttctgaagacatggtaactggtagcggggtacatctagaagatgccggctgaagcgcttcagatatgggagggtgcagagggaggagttggagggttggcgcaggggggtggggggattgtcatgtgaacagaaggcttcagctgcagaagccatctctgtgggacccaatggttacccagaaatgaagtctcggatgtgtgtgcaccctggctccggagcccgcagatgtgatccaggttccatgcagggacacaggcagggaggacccagcactcggaggcagcagcagcaggcgccgtggtgtgctgagacaagccaacagcagggcagcgtggggaccatgggcggggccctgaggagggcgcttggcttatggcaggaacgtgcctgcccctgtgccagctgtgaggctttgacggccatcacctttcccacggtctctccccaaaacctcatttgcctggagagtggcccggaatcgggccctgaacaaactgtcccttaacagatatggatgccttcagccaaagccctccatgtcagagggtgtgagttgggccggccgccagaggcactgctaggctaaagacctctctacccccagcaaagtgcagctcccgtgcccctccaccttgcccggggctggcggttcctgtgtctgatttcaaggtctctggggagcacctttgggattcgggagggcgtggggtctgacaggaaacaagatggccacttcccaatggccatccccaaggaagggacaggaaggacggcagtggccttggggttccgggtggaatggagggcgagggctggggcggccccgtcgcctcaccctgagactcccgtcagcagcagatggacccagctgcttcggagtcagagacccagctgtgccctcggttctgccaagcaaacttgcactcactcaagtcccccttgggagtgttctgcattttcttccccagccctggggatgaagagggaaccgctatttcctgaggccgagcaggcctgtgcctcacgagctccccgggcatctccgggcaggcctggcctttgcatgctcctcttccggcaacggatgggtcttgttgcctggagagcagagacaccaggagggctgggagtgggagctgtgcaggggcgagggtggcattcttcaatccaaatgtttctccgccagcctctcagccctgagtcactaaagcacaggatggtggcggaggggaggatgttaacaaaccttgctagaagctcctccgagtcagctcacccaccaagcctttgccgggggtcagctgggcacccaggccatgggcacagctgtcgtacgtccttcccaaacaggaggtgccctcagtggagggggagtgtgaaaggcagtcccctgtttgtagggcacagcttctatggaatattgatttcttaggaaaggttccgtaacttcagcacgtctagcagtacgggcaccagtggcagctgcatgtgctcgcctgcgtggcatagccttgggtaggtgcaagctcaagtcctgggcagcctgactccccaaggctgtaggggagagccccagtgcagtcccatgaggcccagcgtccagagcaggaagacagttgcagggccagaggcctgctcccaggaggggctgtgctgccgccaaggctgaaaaggtgcagaggagcagtcggggcccagagcagggtgggcaggcctggctggcgacagcaggaccctcccagctcacgcaccatggcttgaaactgcagcacagctaggagggtccttggagatcacatggtcccacctctctccccaaacgtacataccaggaaatggagacccagatgggacagggacctgggctccagaggcaaagctgctgccctcgcctcttccaggggtaatgactcaggggaattcagcgctgcggcagacacagccaagcggccagcggagctgctggcatcccagccctgcctggccgcaccttatcctgcgctccctgggcggagaagacggcccttgatgctcacagcctcctgccgggtctcaggcaatcccccactgcaggcacgaggccgggctcatacactgctggtctgggagccccagaaaggccaggtgcacatctccacgggctgtcctctgcctcccctccccacgcaatcttccgcactcacactcgctcaggctctaggcttctgaactcagccagcccaagccacatcctactctgccactacactattgtgccaccaccagggagccacggactcagtttccctggctgtagcatggggacaatcccctcagacttccggaactgctgtaaggataaaatgaggtccttgatggcaatgcgtgtgacctttggcacaaaggagaaagctaacgggacctagtgacaacagccgctccctactcgcttccagcccctcccccacccaaacgtcctggctccaccccttccaggcactgaggctcaaatgctattactattagccagaatctgacacatgagaatgagaggagacactgcagggggacctggggtgggggatggaattggcagcgctgtcagccagactttataccctcttcactgtgggagcaggaggtggctctggggcaccaagttgcgcccagtcctcaatgggccccttcgctggggtgccagtgcagattctgcgcgtaaccgtccacctagcccaggcccagcctagttcagggcccccaaccccactcccgcgccccaagcgccggagcccccactcattggcgccactggggaccggggagcgcagggcgcgtcgggcaggactggcctagagaacagaggcttgcaggtgggaggaaggcggcggggggtggggggggcgtgggaggtggagggagacgccgggcaggccgcggcccctccccgctccctccccgcgagccgccagctacagtgcccctcctgggcagggggcggagaagacggcgactggaggggaggaggcggcggcagaggcggaggaggcagcggcggcggaggcgggatttggagtttccctccgcagcggcggcggcggctgcccctcggctccaggagaggccgccacccggggttccggtggcgttaggctgcagcagtggcgcttcccgccgcccgagcttcggaaacttcccggccgcgacgcagggaaccggcgcggagaaccgagcagagcggaggtgagtggagcaagcggcgccccggggacccccaccccccacccggcctggctgcccccgccccgacgtgcgctcctccaccctgcrcccccaaagtcctgacaacgcacaccccacgaagccggcgcacgcgcccctacgacacccattcggtgctgctccgcacacccccgcacgccgcccgtgcacctcccgtgtctcctgccacttgcaccggctgcacactcgcgcgcatacaaaccacgcaccacagacccgggtgcctgtagtgcacacactagctgcccctgccccaccactcaccactgtccccaactcatgccaacccaccgagaccctgccacgccccagtacacacccaggcgcacacgcacgcttccaacacgtctctgccatacctgcaccaacatagctccccctaccatgcccccaccacctcgaactccccatctgcccattacagacaccccacccacgttgccagcccagagacactgcagtccacccatcctggagcgaggtcccgtcagaaacccacatcccagtggctgacgctccccacgtcccaggcacacacctccagcatctccaacgcgcactctcatccaccccagcacgcgcgcacacctgctggattcacgctctccagcatcctgccccgcccccatcacaaatagccttcgacaccccccagcacatctctgagtccctccctccctcacccccaacacctggcacgcgggctctagaggctgcagcatttggtggcatccctgccaggcacctctggctccccttcggcagaggctcagcagccttggrccccccaggtgcctccctaaacagaccttgagactccccagcgactagcttggcctcttccctaagaaataaagaaggcactttggggtccaaggtagggtacttagatgtggaagcaaggggccccggggaggggcggggaggcggcggagagagcccggcgctgaaatggaggcggcccaggtgggaccaaaggggcgccagctgcccggcaagcacgtagtaggtgggttccatgggggctggcgtccgcgcgcgctgtctgggtgcctgcctgcgtgtgtgttacggggagggctgtgtgtgcacgtgtgcttgtgcgtgtcggggtgggggaggagtgtgtgatcggcagaaggaaaagcaggagcagctccctcaggcaacaattggtttcattcattcatgccttctttgttaacgagcatttcttccgcgagcgccgggcgcgtgccaggccctgcactgggggctggggccagcctggggccgggcacacacccgttcctgccttggaggaactcccagtcccgcgaggagaccgaccaggaaaagcagaaagccatccccagcagaaagtggatttggtggaaaagacactggatttggcaggcacgctgtcgccgggacttgtgctcttggccatgtgacccggccgcgacagccgaaatcctgtcactcggcccggcgggaacggtgcatctcgtgggggaaggcggcgcggcgccgctctcgggaggctcccgggaccagagggcgcacgcggcgcgcgcgaggcctgcaggcggcggcgtccccgcggcctccagggggcgctggcccggcccggcggaggcccggggcgcccggcgggggcgggtgcgggggcgggggcgggggcggcaggcgcagcgcccaccctgcggcgggcagcgagcgcgcggcctggctcagcccgccggagggggccagacgaggcccgggcgcgcggcgcggcctcccccagcacagcgcacccgggagcggctgccggcggggcggcgcccagagccggcgctacagggggcctgagtgggggcggcccggcgagggtcgcgggtgagagggggattagggggttggctgcgctcagccctgcagtgcggaggtggcaacaggttcccatttgtcctgttgctggcgctgcgggcgctgtgggccccgagcactgagctctgactttggaaattgagcccctcatggcctcctcccaaatgctttctcccggtgcgaggacttggcagcagggctccgcagttaggtgcaggggagcccctcgccaagcgtcgggagacgtggacccttggatcctaggcttcccctcccttccccattgcggaggttgcctctccccgtcctcattccagcccagctcctctcacctccagggaaccctctccagagagcgccactgagcagctcaggagctccctctctagccgaactgagcccccacggcagggcgggccggggaagtggctgtccagctccctgctggtcacagccctgcgccacccccactctccacaacaagactggcacatggcagaacctccgtggtgccttcaacccctgcccactctgagctcccacccacagctgcagtgggcctggaggcagcccccaggctgggtgccggtgtccacctccaccactgtggagctaggctgtggacagaaaacagaagacaaagtccctgccccaggaacacactgagaaagggggaaagtgaccacactagggagcacagaggagggagactactggctccgagttgggaaggctgcctggaggagggggcctgaagaatgagcagaatctcagaatctgggcagggggcataggagggaggcctgggctggggcccttgcccactgggtgagagaaggaagggcacagtccagctgcccaaagcccttggatgcaggaattaggactcttgttagacgcagggacatggggggtgtggccggaaagcagcccagtgccagggtcctgggagtccccggctagcagcccactgcccgaaagggagggagagaggcaaactggaagccccttagaggtgacccacctagctttccgtcacctgccctcttacctaaccatgacctgagacattttctcctctaactccatggctcctgagaggagtctttagactcgtagtttgctttgcattttccacttgttagaaaaatgctttgtggtgcccatcctcgtgtgcataactttgctttcttttactttagttccttagattcccaaaagtggtcaaagggttgggattttttcctagctcttgatattgccagattaatttccaaaggggccgtaccaatatataaccctgcaacagttgaacagcacgctgatttcacagcaatcttgccagcactgcgtgttctcaaaaatgagaacatttctaatgcagtaggtgggaagtgttacctcgttggtcattgttacttgtttattggagtggctttccttccacgcctgaagttgaaccttcccccaaatatttgttaggccaccgcattccctccttcctgcagtatgcagtgttttcaggttctttgcccatttatctacaggggtcttaaccttttagttgggtatgagctttatcttatctggcgtacattttccttcaacactgttatttgcttttgttgagctttaagcagagaagggacttttagccagatcagcattgtggacacctccccctgaccctggtctcctgcctcagtgctcaccacacctgagaccttgtccagtgctcttgctgcctgtggatctgtcccgcctgttgtgcccatggaggaaaggatggaggccaccagccttggttgagtggatggcattctgacgttgggcagggctgggcagggcagggtggagggcaggtcgttgcaggcccggaggcagggagactgttgtgcaagacgtgacagtgacctggcctaaagctgatgaatttgagccctcggctagggcaagggacaggggagagaggcgtggatgtgagagatatttaggtagaaactagttctttccactttgattagccgaaggggggttaagggaaggaggcagaggggggagccacgggtgactcttaggatcagtaatgtgataagagcagagtgccccagtttagggctgggagctcagggttcctgggtgcttttggccagtcctgtgcgagtgaagcgggctggtattggtaggtatccaggagctacccctgcctgcctagccctgcagcagacctctgggccaaagctgcactaagtttctggtcctgcctcctcctcccctccgtgatttcggtggcatcccaagtttgcccargctgctagctctgagcccattacagagatggggccactgagatccaggcaggggagaagatgctccagtatcaccctgtgagttgggctggaggcagcttctgcggcagaggggctgggctctggtcctcacccctccccctgcctcccgaggccaggctggcgccggccaggggagccgcagctggtcccctgctgggcccctgacctgcccttggcctctgccccgaccccgtcccgcctcggtggaagccccagctcagccgactcgcaggtcccacccgactgcttcggctagcacccgttggctcaccggcccgccgggcccgcccccggagccccgccccggcccgcccctcggagttgtaactccacgtccgaaggcagtttccaaggtggaagctgggtccggctgccaggaagcggccggtgcgcgggctgcgcgggctgcgcggggctcggcttccacgtgcgagcctgcaccgccgccccgccctctcctggcggccaggcctggggactctctgccgcgggacggcgcctcgcgttccgccgtggcagtggccgtggccagaacgtccacgcgcggtcgtccaccgccggatctcgctccaggtctctttccttttgttctctcctaggggtagggggagatgggggaccgggggccagaccacctctgagaggactcgctgaggcccagcacctcggcgcctcctctgttcccctggcccacctggccctgggggagatctaggcctcgaacggcactcctcgcacgcacacccccagccagagtcggaagctcgaacttggggagcgttcgcgagaagaccgagacaggagcagaaagggggtatggagggaggcggctgcgacctcagggtaccccaagatgagcctcgaaggggcggttagccgctcagccctcttctcgaggacccttccccgggccgagctgctgcctggggggtttcttggggcgccttgttgggagtcctcatggtgggggaccctgggctcccgccttcaggacgcggggccggcttcaagtctgagccccctcggccctccggtagctcacaccgcgccttctctctcttcgcagcgcccgtggtccagcgtgtagggagccgatcgcccatggagggtctgggccgctcgtgcctgtggctgcgtcgggagctgtcgcccccgcggccgcggctcctgctcctggactgccgcagccgcgagctgtacgagtcggcgcgcatcggtggggcgctgagcgtggccctgccggcgctcctgctgcgccgcctgcggaggggcagcctgtcggtgcgcgcgctcctgcctgggccgccgctgcagccgcccccgcctgcccccgtgctcctgtacgaccagggcgggggccggcgccggcgcggggaggccgaggccgaggccgaggagtgggaggccgagtcggtgctgggcaccctgctgcagaagctgcgagaggaaggctacctggcctactacctccagggtaggtgccgcggggccctccttccagggggttcgggattcatttgaccttaggccagccccacttctttttttctaaagcgagttgaggcccccctcccctgatgacctgccaggctgctttgagaggagggaagcctgagtgtgaccgtggggaagttcttcaccctcggcagcccagtctctgagcctggaaaatggggagaattagcctgacctgagctagttctcaggatgctcaagaacgaattacaaagtgcgggctccccagggtctcggcaagggtatccccacctccccaacctgctcaggaatgagcaagggaggcaggggtcagacagcactggtgcaatcacggctcactgaagcctcctgggctcaagcgatcctcctgccttagcctcccgaacagcatataaagtgtcaggtgtccagcccggggaaatagtatctgtaaatagagatgctggcttcttgagccatattctcccccaagttcccccacatcttggggtcccacttcatccctgagagtcaggagatgcccaggcagagagctgacatctgagttcctccttttctttagctgatggccgcagtcctccctaaggctggcagtgcatctcggctctgttgagccctcacacctgcctcagcttgaccctaggggtgtaagatcctttccggtggctcagcgtgagcccagcttcttgcagcccgagctgactgagggtggctagggccccacgtgggtaccaggacacaccaagctgctgggttttgtgttccctttgggaacatttgcaaaccctccaagttgtcyagggtcatctccccagccccagacagaggcacttggctgcccagaaggccaggtcagcaggccccatgccctctccccaacaggaggcttcagcagattccaggccgagtgccctcacctgtgtgagaccagccttgctggccgtgccggctccagcatggygccggtgcccggtccagtgcccgtggtggggttgggcagcctgtgcctgggctccgactgctctgatgcggaatccgaggctgaccgcgactccatgagctgtggcctggattcggagggtgccacacccccaccagtggggctgcgggcatccttccctgtccagatcctgcccaacctctatctgggcagtgcccgggattccgccaatttggagagcctggccaaactgggcatccgctacatcctcaatgtcacccccaacctcccaaacttcttcgagaagaatggtgactttcactacaagcagatccccatctccgaccactggagccagaacctgtcgcggttctttccggaggccattgagttcattggtgagtccaccccacccacccttccctcctgtcctccccaaggcctgctctggcctcccccttgtgagtactcctcccaagccccgctgccattcccagagccaaaagcctaggtgacagttctaggggacaggcagagctagggcggcccccagaggccactagagaaacctgcaggtcgtggccatctggcccagggggcagggcggggcctttgagggcccttcggaaggcctcggcctcacacacgcctgccctccgggtctcccgggccctttcctgccccatctagatgaggccttgtcccagaactgcggggtgctcgtccactgcttggcgggggtcagccgttctgtcaccgtcactgtggcctacctcatgcagaagctccacctctctctcaacgatgcctatgacctggtcaagaggaagaagtctaacatctcccccaacttcaacttcatggggcagttgctggactttgagcgcagcttgcggctggaggagcgccactcgcaggagcagggcagtggggggcaggcatctgcggcctccaacccgccctccttcttcaccacccccaccagtgatggcgccttcgagctggcccccacctagggccccgtggccggcaggccggcccctgccccacccccacccacgggtgtccctgcccactcgtgtggcaagggaggggagggcaggagggctcggcctgagcagggtgctggggggagagcgcaatacctcacgcgggctgccgtcctaatcaacgtgcctatggcgggaccacgctcggagcctgcctcttctgcgactgttactttttctttgcgggatgggggtgggggttccctctccaggtggttgtccaggcccaggtcccggccctgggtgctcagccagctcggctaggccctgcgcctccctgcgcttcccccttcaggaagggtgtgtgccacctcgttgcactggatcccagtggctgcttgggggagaggcgtttgccatcactggtgttgtcacctccctgtttctccaccaagggcttgggcctctcggggctggggcctcccaggggatggggacccagaggtgcagtggccgcccacatccatggcctaggagctactgggcaggttcccggccacacatctggtgggctgttttgttttttttttttcctcttcccccagatgtcttgacgggatcactggggctctttgtgagtgagggtggccaaactaccgccggaggagatggggtctcagagcgagagctgcggagggggaggggaagaagaaggcctcacttttgctgctgcggggcccacacagccgctgctactttggggggtggggaaggggccaagctgcagacacacacagtcattcatttctgtccacacccctgtgggtggcgggtgtgcgtgtgtgtgcttgtgtgtgcgcacgtgtcggcgctcacacacacatgctagcccactgatgcacccagcccagggctggcagtctttgcagcgtggggccgtctcaccctggagcctggagaggatctatgcttgtttgtttttgtaatccatatcatagttgctttctttaattgttccttctgaataaacagtttatttaagatactgagtagagagagaagctacctcctgagcgccttggagggtttgggggaaggtggggaaggaggccctcttggtctctctggactgcccatggtggaaaggggcatgtgccaggctggccagggactcaagtgccaccccactccctgccccatgttatcatttcccatcttgtgcttacactgcccgctggcccacgctctgagtcgcccattcattcacctccatttgaacccctagtctgtgccacacactgtcctggggactaggttgcagcagtgagctccgcctgctcacagcagactttctagtgggggaagaaacgacaaatgcaacagtcacagcactgcggttgtgccgtagacgttcattgccatggacagagcagaaaagtgaggggccagcactcacaactgatccctgagacaccggccaagtcagccccgagccctgcctggagcctcctgagggctgccccggctgggtggcatcctgagagtgacagggaggggtgtgggcagactggcacatgtgagtgttgtggttgtctggctgtggaatttgggctgcaaaggcccaggctggggactagaagagccccatggagaacatggagaccaacgggccacctaaagggacagaggtgaactgcacctctcctcatattgggacactgcaagtgccttctccacaccataactggtggggtctataaggctgtgactctccaccatggacatgtagtagaggggaagggcagctggagggtggcggggagcgagtgcagccagagaaagctgtggaggctttggagcaatgtggcccagaacccacaatccaaaggcatatgcgtgaatggctgagctggtaggaaaggaagagcaaggtgatgaactgagaaatgaggtgaatcctctgggccagcggagtaagccactctggggttagcccaggagccaggaccctccactggaacgcagccccaccaacaccttgatttctgtccagtgaaatctattttgaatggctgatctactgaaatggaagatgtgaaatctgtgttgctgtaagccactaactctgtggtaatttattacagcagccacagaaatctactagaacaggtgacctaggaagatatatcccaaataaagaagagggtgtgtgctgatcttgaccttggatctggggggaagtggaataaaaggaaaatgttccccctcccctgagagcttatagccacaagctgaactgttcttttagagtggtctaggcatagagtagtggacactccagaatctctctcagaggtacttagaaacagtgattcagccgggcacggtggcttacacctgtaatcccagtactttgggaggctcacctgaggtcaggagttcaagaccagcccggccaacatggggaaaccctgtctctactaaaaatacaaaaaaaaaaaaaaaaaaaaaaaactgagctgggcatggtggcacgtgcctgtaatcccagctacttgggaggttgaggcacaagaagcacttgaacccaggaggcggaggttgcagtaagctgggattgcgccactgcactccagcctgcatgacagagtgacagagtgatgagagagtgagagtgaggccctgtctcaaaacaaacaaacaaaacaaaacaaaacaaaacaagaaacagtgatctggctgctggagaaggctcctggatttgtcttgaagctgcattcgactatcttacctacagggtttactgagattgtgacagcccaataaaaatagcagtttaaaacataaataaaatacatttttaaagtttcttattttagaaacaaggtctcaatatagaacttaaataggccaggtgcagtgcctcagcctcccaaagtgctgagattacaggcatgagccaccgcacctggcctatttaagttttaaatgaagtggttcagaggtcatattgctccagagtgaccagcagaagcaagcacaaatcctctgtggagggagggatgtcctttaaacacaggcctcaaagcaccgctatagaaaattccaaaatacgtaattttttaaaatcctaaaatgtacaaggaaacaagccaccatgagttatagaaacatttagcatgtgaattcaagtatcagtcctgcaaagatagcagcctttgaaattatataacagactataagtataattaatatgcttaaagaaataaaaggaaatattgaaactgtaataaaaaagcaagagaatataaaatgactagatacgcttgaaagaaaaccaaaaagagctcctagaaatgaaaaatatgacaattgaaattggacatttaaagtttaaacagcatattaaacatagctgaagaaagaaatagtgaactggaagatggatttaaggaaattacccagaatgcagcacagacagacaataagacagacaggtcacacatatatttagttggatttctagaagaaaaaaaggagaatagggaatataaagtattttaataaacaatgcctgagaaatttccaaaactgatgaaagacaccgtggaagagactgctgagtgtcccccagtatccattctctgcttctcctttttagaaataaaatgcccaaaggttaatagcgtgtatggcttcacagctaaaaactttatttcccatcctcccttgcggctaattgtggccatgtttttgcatattgtctcatatttccattagagcccttagcattttaatcatagttattttaaacttctggtctgatcattccaacacccctgtcatagctgagtctgcttctggtactggctctatctttttgaactatgttttttggcctttagtatgacttgtcttttttttactttttgttttttttgtcaaaagctggacacatactgggtaaaaggacctgctgcgaataggccgtagtgatacagcagaatgtggagggaggaaaagcattcagtcctgtgattaggtttctgtctttgggcgtgcctatgcccctggactgtgaatttcaccaatgcttctcagattgtgccccgcttaggtgggccaggatggctacaaaagactgagttgggtatttcgcttccctcaggtcagttaggctccgccaaaaccctaataggttgggcctggtaagggttactcttgagggcaggcctagttaagaaaggaacgccctgggcgtatttcaaaatgaccactttcccctccccctgccagaagcatgatgagatttttctcactgtgagaacctggttgagctcctaaaggtaaaacttacaaaagtatgggagccccaaaagactgccccatcccagagttttaactctcagacttgtccgcactgagcccccagcaattcagcaattgcagttcgggtgtccctacgccagcactggttcctgtgcctggcctcctgctctgctaagttgtgattctctgtgcccgcctgtctgtctccccaattttgggggcagcattttgcccagtgacttcaattctctgataaatctaagaggagttgttgattttaaatgtgttccacttttactcgttcttaggacagaccgatgacttctggcctccttacacactggaccagcaacagaaactcccctgggtctgtttctattgaccgatttttcttctcatgatggctcacatttttatgcttcttctacctgagtcagaaagccgggatgtagagctctcttagtctgtctcctttctctcagggaccacagtccttcactgactgctgtcccccatctgaaaacaatggattttcatatattttgcccagtttctagctgtttatggtgagacagtaattctggaccctcctattccctcatggtcatattgatattgagtgactttacattttgttaagacaaataagcatattaaattttttagcataactagaatataaataggatatactacttccaaactagtagaggaaaaaagcaaataatgaaggaaaatatcaactaatcaaaaaaaggtcaagtaagggaaataaagaaacagaaacattggaataagtagaaagtataatatgttagaaatagatccaaaagacggccaggcacggtggctcacgcctgtaatcccagcactttgggaggccgaggcgggcggatcacgaggtgaggcaatcgagaccatcctggctaacatggtgaaaccctgtttctactaaaaatacaaaaattagccgggcgtggtggcgggcacctgtagtcccagctacttgggaggctgaggcaggagaatggcatgaacctgggaggcggagcttgcagtgagccaagatcgagccactgcactccagcctgggcaacagagtgagactctgtctcaaaaaaaaaaagaaagaaagaaagaaaaaaagaaatagatccaaaaagcattaagcaaaataaatagattaaattctccggttagactggattttaaaaaatccagctataagctgtttaccagagacgcatctaaagggtagaaccagaaaaggttgaaagggcaggactggctgggcacagtggtggctcatacactcaatcccagcacttggggaggtcaaggcgagaagatcacttgagcccaggagtttgagaccagtttgggcaacatagtgagaccccgtctctacaaaaacaattttttttaattttttttttaaaaaagaaggcccaggcacggcgactcacgcctgtaatcccagcactttgggaggccgaggcgggcagatcacctgaggttaggagttcgacaccagcctgaccaacatggtgaaacgtggtctctactaaaaacacaaaaattagctgggcatggtggtgcgggcgcctgtgataccagctactcaggaggctgaggcaggagaatcgcttgaacccaggaggcggaggttgcagtgagccgagatccagccactgcactccagcctgggtgacagagcgagactccgtctcaaaaagaaaaaaaaaaaaagaaaaaaagccctgaaactatcaaaaaattagtcaggcatggtggtgcgcacctacggtctcagctacgtgggagactgaggcaggaggatcacttgaaccaggaggttgaggctgcagtgagccgtgattttgccactgcactccagcctgggtgactgagtgagaccctgtctggaaaaaaaaaaaaaaagggcaggacctccacctatggccaaatgcagatatcagcaaataacctccccaaaaaagtaactttatataaagctggacaaaattgacaaaaacaagctttttgatctggaagtcaacggaaaatgtctcataatccaagtggctggattttgagtaagaacagcgggagtctgtggcattctggcccagggctgctcccatccctcctggcttgctgggcatggaagctatgccaaggaggggaaggccatgaagaccagcagcttctccccataggcttgaaaggcgctcgctcatttggatgattggtgggcaacacctgtgcccagcggcatgatcggtggaagtgacttcttggaggtgggctggcagggaagattttttccatttaaaaaatatatattctagttaaaaattttaagcctggtttcctaggagctaccctgtatctgcctagcttggtggtcagccaatgactggacagaagctgtgctcaaacatctcaagccagtaaggcttgtgtccttgggtctgggtgtgggtaggggagcttattcaatgttcaggctgctttaaggtcttctgggctttcctttccactgggccctctcacatctcttatatacacgtgcatagtcccagggcagtccaggagagcgtgagtagcatgggacccctccagtctctggtcagctagaaatatactgccgcaagcacatccatagcctcagttgagtagagctgatctgtttgcccttcccaacccgcccacctccaaga

SEQ ID NO: 95853 - DNA, 17945 bp, Homo sapiens
ccgggttcaagcgattctcctgccctagcctcccgagtagctaggattacaggcatgggccaccatgcctggctaattttgtatttttagtagagacggggtttctccatgttggtcaggctggtctcgaactcccgacctcaggtgatccgcccgcctcagcctcccaaagtgctgggattataggcgtgagccaccgcacccggctggttgcccatttttatgcttatttcttgatgatatgctaaacaaggggtggattattcatgcctcccctttttagaccatatagggtaacttcctgacgttgccatggcatttgtaaactgttggaagtgaggacgagcagaggtcactgttgtcgccaccttggttttggtgggttttggccggctcctttactgcaacctgttttatcagcaaggtctttatgacctgtattttgtgccgacctcatatctcatcctgcgacttagaatgcctcagccgtctgggaatgcagcccagtaggtctcagcctcatttgacccagctcctgtttaagatggagttgctctggtttacacacctctgacaccatgtcatatggaggccaccagggagctggcgaaacgctgatgctcagacatatatgccattcgtctggggccctggtgtctattcaagaatctacaggtcaggaagctgatatcactgggaggggtccttcagaacttccaaagatgtcccgcaattcacctccagtagcttgggccaatggagacgcagccaggtctggaaagttgcggaggggagtttcctgctgagatgcctgcccctgctctcccctcagctggagtgggccatgaagctctggtggccacacagtgaagccatgattgccttcctcatgggttacagtgacagtggggaccctgtgctgctgcgcctcttctaccaagtggctgagtacaccttccgccaggtgagagctgcctccttgtcccctctagaggctgaatgggggaatggggggagtctggcccggctgcgctcttgccccctcgctgagcacagtcgctcagctggtctgagagtttccggagccccagtgctgttcgttcagtcaacgaagaagcctctgccctcctagagctcgaattttggtggtgggggcgggaggagcagagtgtaagcaagcagacctaggtggtggtgagagtgacagctgtgggaataataccactggagagggttgtgggggggctctttcctatggggtggcagcagggaagcactgagcaggggccgagtcaatcaggggtgtgtctgagggactgggagtctgggcagggtggggcatgtggcacagcaggggggcctggcagcccgggaggataaaggcagagtgggcaagggacggactccagctgcctggtctgattccattgttacctgggtcctggggcttggaggggagggtgttatgggggaagtctgtagggaacagggcagaagctgggacagcagaggaagctgtagctgtcatcccagccagtgagggctggcccaggtgggagctggtggggacagagggttcacagtctggtggagcagcagtgggattcctgagtctccagttcagacggagagatctggactcaccatgaatgttttcagtatcacaagaatgtagatgctgcctggcacagtggctcatgtctataatcctagcactttggcaggctgagacgggaggatcgcttgaaccgaggacttcaaaaccagtctgggcaacataacgagacctggtctctacaaaaaattttaaaaaattagctgggtgtcatgcacacctgtagtcctagctactcaggaggctgaggcaggaggactgcttaagcccagtttgaggctgcaatgagttatgatcacaccactgcactccagcctgggctgggcaacagagcgagactatgtctcaaaaaaaaaaggccgggcacggtggctcacgcctgtaatcccagcactttgggagactgaggcaggtggatcacctgaggtcaggagttcaagaccagcctggccaacatggtgaaaccccatctctactaaaaatacaaaaattagccaagcgtggtggtgggtgcctgtaatcccagctacttgggaggcagaggcaggagaatcgcttgaacccaggaggcagaggttgcagtgagccgagatcgcaccattgcactccagcctgggggacaagagcaagacttggtctcaaaaaaaaaaaaaacaaaaaaaaaaaaacagtacagatgctgctgagatctatgaggcaaaaagggaaatgggggcccagcaaaggagacaagaatcagtggtgacgcaggaagaaaaccaagccaggggctccctgaagcccaagtgctaggagcagagtgataagctgtcttgactgctgcccaggaggcaactcgagctgctgaacacaggaaagggcatggcacccagtggaaagggcatggcacccagtggaaagggcatggcacccagtggtggcaaggcctgggtggtgaatgaatgaagattcatcatgcgtttctaaagccacgactccgactccactggtgaaccctggtactgcgaggactatagcaggggatcttattctggggtctgtgagcttcgaaaccgggggcggagaatcacatctttatttgtactaacctctaactgaaactagcatttgctgccattatgagtggaggcaatgaaccacattggtaatagaagtgcctggctttgtcaccgatagaaatccagatgtgtttacattgcattgcagttagagagacatctgcaagtatcacatatattcgtcactacttccaaagcagcagggttgttagacctgcagctatatcttaatatttaatgcattcatagagtgtgtgttaggggccaccagttctaactcaaaaatgaaattgaaggaatacattttaataagatatagatgacattaaacaattacaaaagttataatcaacaggtaaatcggctgggcatggtggctcatgcctgtaatctcagcactttgggagactgaggcgggtggatcacctgaggtcaggagttctggaccagcctggtcaacatggcgaaaccccgtctctactaaaaatacaaaaattgggctggtcgcggtggctcacgcctgccattccagcactttgaaaggccgaggcaggtggatcacttgaggtcaggagttcgagaacagcctggctgacatggtgaaacccccatctctattaaaaatacaaaaaattagccgggtgtggtggcgggtgcctgtaatcccaactactggggagactgaggcaggagaatcacttgaacccgggaagcactccagcctgggcaacaggagcaaaactccattaaaaaaaataaaaaataaaaaaaataaataaataaattagccgggcttggtggcgggtgcctgtaatcccagctactcaggaggctgaagcaggagaatcactggaacctgggaggtgaaggttgcagtgagctgggatcacgccactgcactccatccagtctgggtgacaagagcgaaactccgtcttaaaaaaacaaaaaccaaaaaactaaccaacaaacaaaaaaacaggtaagtcattatgcatcaaccaacataacagaatacagaaggcaaaaatccagacattgaaggaaattcttctttaccttcctgtgtcatgtcaagcagtcaaaaaataagtaaggacttgaacaatgtaactcaaaagacagaatgaatacacacagaactagtttttatttatttatttatttatttatttatttatttatttatttatttttgagacagggtctctatcgcccaggctgagtgcagtggcacaatcatggctcagtgcagcctcaacctcctgggctcaagcgatccttccacctcagccacccaggtagctgggactacagctgtgtgccatcacgcccagctaattctttaattttttttttgtatagatggggtctcactatgtttcccagcctggtcttaaactcctggcctcaagtgatcctcccgcctcggcctctcaaagtgctgggattataggcgtgagccactgtgcccagcccaggactagttttacttcctacaaagaagaatacaccaactcttatgggccaccatttaaagagacattttcatagtggacttcaatgtaattgagtccatgatccttttgagaaggggctgaactgacaagcctccctgagacaggtgccccatggaatgctagtggagagagaaggaaagagagtggaatgggcactgggcaggggcagagggaggaggagatgagtttgggaccaatggtgagccaggacaggagtcagatgagattgtgcatctactggaagacaggcctgtgaagccgggaatgggagctccaagggagtcacttcttaagagtttcatgacaggtcgtcgcctccatcagggttctttgtttcttttcttttcctttttttttttttttttttgagacggagtctggctctgttgcccaggctggagtgcagtggcgcgatcttggctcactgcaagctccgcctcccgggttcacgccattctcctgcctcagcctcccgagtagctgggactacaggtgcccgccaccactcccggctaattttttgtattttagtagagacgggatttcactgtgttagccaggatggtctcgatctcctgaccttgtgatccgcccgcctcggcctcccaaagtgctgggattacaggtgtgagcctttgcacccggccgggttctttgtttctttgaatcaacgtaaccacgactacaatcacaatagagaacttttttgtttgtttgtttgttcgtttgtttgtttgtttgagatggagtctcgctctgtcacccaggctggagcgcaatggcgtgatctcagctcactgcaacctccgcctcctgtgttcaagctattctcccgcctcagcctcccgagtatactgctgggattacaagtgcgtgccaccacgtccggctaattttgtatttttagtagagatgaggtttcaccatgttgtccaggctgatcttgaactcctgacctcaggtgatccgcccgcctcggcctccgaaagtgctgggattacaggcgcaagccacagctcccggcccgatagacaacgtttctacaccccagggcagagttctttcattccatctagcagtgtctcatccccttgcccagtcggttatatagttgtagcctgcctgctgcgcccacccctgctttcatctttgtggaggacgcagtgtcgcggttaagatcgctggttctggagccacgtcacctggggtcaacccaggctctgacccctggtagcgatgcagtggcatctgggcgggtcctgcaggcgctagctgtcactgtctctgttattccagtttcgcgatcccgagtacggggaatggtttggctacctgagccgagagggcaaggtggccctctccatcaagggaggtcctttcaaaggtgagtgggggagagggcggggccgcaggggttgcgcctctcggctgcccccggccctcactacctgcccgcctctacccgcaggctgcttccacgtgccgcggtgcctagccatgtgcgaggagatgctgggcgccctgctgagccgccccgcccccgccccctcccccgcccccacccccgcctgccgaggcgcggaataaaggctgagtccgctccacctgcggctgtgcgcgcgtctgtgggctcgcgggaggggggctgtcgcgccgagggaggggccggctccagctccggggcagcgcccgccccgcccccaggcccgccccgcgctgaccggctccgcgcattggcccgccccgtgcgctggcctgtcccgcgcattggccaagcggccgggaggacgggcccggcggccgtgcacttccggccggtggccggcccggcgcgcaccgccccttccgccgtcgcccagcgagcccagctccggtcccagccccggccgtcccggcgtcgcttcggagcgcggcggcagctgactgcgccttcacgatccgctgggacccgcgagccccgccgccgttatgaacatccgcaatgcgagggtgagcgcccggggcgggaggctgtccgcgccgcgtgggcgccgggccgggtggctgccgcgcatgctcccgagggccccggccgagcccggcccggtggccctgagtgtgcctgcggccgctggacctatggggctggcccagcccgccgaagaggccggggcgcggggccggggctgcgattccctcctgtttgcgtgatgtcgggcctccgttgggtgggctccggggacctccggggcgcccactcctgttcctgtgctccgggcgttgtgcaaagtcagatcgtcacagtgcctgcccagccccgagggagsgggrccgagcagaccgacggggagcaggcttctcacccgtggtcaccgccgccttagactgagcgcgttccactgccctccttccctgcagccagaggacctaatgaacatgcagcactgcaacctcctctgcctgcccgagaactaccagatgaaatactacttctaccatgscctttcctggccccaggtgggcagcttctgaatttgggcatgggggaaagcaggccgaggaaaatcccatctggccatcttggagggagtggacaagtctgtcagagcccagggggctgtatggtcggtggcgtcctgggtgttttcagctggcagacaggggcaaaggaaaagaaggcgcccgaagggagcagagaataggggcaggatccccactttgcgtcttctttctgggtatgggcagggcacagtgtggcgakggggagaccaagccactcagcccggaggtcatgagccatcacacaactcgccactcgtccagtttgtgtccctctaaagggctcttctagctccgacaagaagttttctcactctgttttcctgtcaccagctctcttacattgctgaggacgagaatgggaagattgtggggtatgtcctggccaaaatgtgagtcaccaaggaggaagacagaagctacacgtgtctggtggatgcctctgtgggctttaaaaaaaatgaataggcttcttcttttcagtacagttgaaagtttatagaaaaattgaacagaaaggacatggagttcttatagcacccctcagcatcccctccctgccagcttcctctgttagtagcatgttggatttgtgtggtccacttgtgacaagtgataaatgaatgtgatatgttactattattattattactattattatttgagacggagtcttgccctgtcgcccaggctggagtgcagtcgcgtgatcttggctcactgcaacctccaccccctgggttcaagcgattctcctgcctcagcctccttagtagctgggattacaggcacatgccaccacacctggctaatttttgtatatttcagtagcaatggggtttcactacgttggccaggctggtctcgaattcctgacctcaggtgtttccacccacctctgtctcccaaagtgctaggattacaggcgtgagccactgcgcctggccgatatattattattaactaaacccatagtttacattactgcacttctctttgtgttgtaagccccatggttttgaccaaatgacatgtgtccaccttcatattatcgcaggatagtttcactgtgttccacgcattcatccctccctctccttaacccgtggcaaccactgattttttactgtttgcatggttttgccttttccaggatgtcacagagttggaatcatactatatacagctttttcaggctggctttttttcacttagtaatacacatttaagcttctgccttgtctttgcgtgggttgacagctcatttctttttttattttttgagacagggtctcgctctgttgcccaggctggagtgcagtggcatgatcatggctcactgcagcctcaacctcccaggctcaagtgatcctctcatgtctgcctcccaagtagctgggaccacaggcatgcgccaccacatccagctaattttttgattttttttttgtagagacaaaaaaaagtgttgtccaggctggtctcgaactcctgggctcaagcagtcctcttgccccggcctgccaagtagctggaactataggcgtgtgccccacacccggcaggcttggggttttcaggcagcagagggtggcaggatcggctgctctgatccaagaggctcccggctctcccccagctggggtcttagggggctgtrgtgcatgtccactctacaaatggcaggggggctggaggtggctgtgcctacactgagctcctttgcagcctctcctttctccctctccagggaagaggacccagatgatgtgccccatggacatatcacctcattggtatgtaaggtccacccaggctctctggtgggggtggaagtgggggttagttggggcagccctcaaggtcccagtccctcaccccatctctgctcttctcccaccaggctgtgaagcgttcccaccggcgcctcggtctggctcagaaactgatggaccaggcctctcgagccatgatagagaacttcaatgccaaatatgtctccctgcatgtcaggaagaggtggaagccgggctgagggaagggggattgagggggagagatactgccttgacgggggtcctggggtacctcagcttttggtgaagatccaggaagtgggattggggggaaggagggaccaggaggaggggcaagacctggacgtgctacccctccctggccaaatccgtgcagctcagcagtgccttgttcccctgcagtaaccgggccgccctgcacctctattccaacaccctcaactttcagtaagtagatctcgatttttctaatgggctggggttgatcccaggtctggcccatcagggcacctgagaccggctgagttgccttccaggtcgggggtgggccggctgtggggaagaggctgtggaccccagcactgccaggatacctccacattcactcggcggctgatggttgaaaagccggcatggagacagcacctgcctgctgaaacgtgctccatgtgttgtgatggaggagctctggcccatgatggctgaggctggcgaagggcacacgggctgtttagtaatgtttgggaatagagaggtgtgggtccctggcgtgagcagatgctgaggagcaggactcaagcatgaccaagcacctagaagaatccaagagagagcagaatcraggagaatgcacattcaggaaggaagggccagtggccaggcagcctagtggatgggggaggtctgcctgaggaccaggaggccccgtgtgcctagcacactagagagaacctggcagttggcatgcccagtagacagtggaaaaaagtgcttgcaagtgaagctggggtgggctgcctgtggagggacactaactgcactcagcccgtttggtaggggatgaagaagagggactgttgggaagggcggtggcctctgggctggatgctrgcaagagggatctgtgacccagatgacgatgtctggtgggaattgctttatagctaagtcagcaatcctcatgtcttaggcctggcagggccagcctaggccattgagtccagctccccttccagggacatggccacgcgagtctgcacacacacctgcccagtgtagtcacggccscagagctgctcaggcagggctcaccgtctttcctgggttctgatggctgttgtgaggcagctcagtaagggacagggcgcagggcagggagggaaggggaaggctgaattcagggcttcagctcacaagaaaccgcagaaatggatccttagtatccaggctaaggacacagaacgggggcaggacgggtggggcgggccgctgtgtcctggagcctttgctggagagaacagagggcaggtcacactggacttkttgtctcaggatggagccttcagggagaaaacatggcaccttgctccagtagccacgataccaggagtggaggagggtgtcccygggatacaggtcttcctccttgctctctaaccctctgcccccaggatcagtgaagtggagcccaaatactatgcagatggggaggacgcctatgccatgaagcgggacctcactcagatggccgacgaggtaagcgcctgcatgaagccaagcaaggcgagcrggggcggcactcaggagccccaagacagtggctgcaggcgagaccgactttggatgccagctcttgtggctacgttgccaggagtcacgacctcagtttcctaggctgggctttagaggaggccrtctgcctagcagcctggagggtgatgggagaggcagagggaggaggcttttagaagggaagtggggaggtctagggaccagtgggtggcctgcctgctcaaaggtagttctgagtcagggttctgcccaaggctcmtcgggtggcagggctggtcaaggggcagcgctctgtygtgggggcctccatggtagtcggtaagcccaggtagcggtggactggggctccagccaggtgtccccactcagtcccgcgtgtcctgcctagccctgctgcctcactatgcccctctcctcagccagcgacagggccaggctccctttgtctggaaacttaggccctgtctctttgcccccgcttctccctgggttcctggtggcagctgaggcggcacctggagctgaaagagaagggcaggcacgtggtgctgggtgccatcgagaacaaggtggagagcaaaggcaattcacctccgagctcaggagaggcctgtcgcgaggagaagggcctggctgccgaggatagtggtggggacagcaaggacctcagcgaggtcagcgagaccacagagagcacagatgtcaaggacagctcagaggcctccgactcagcctcctagagcctgccccatcccctcctcaccccacgagctttcacaataaattygctccgtggcactggggaactttgtgtgtgagcgcgcgcacatttagagggtgtgtttctccaggtcctctggtggggatgtgagccttggccttttgacccagagcatcctgccaggcccgagtacaaggaaagagctttggaggtgggactccctagtctcatgaccttcagcagctgtggccccggggaaggaggccctggacttatgggagagaccctgccttggaggtctgcttggccacgctgaatgtgttttgtggcacaagccggggctgctcaggctcaaagctcaacagcagggctcccactcttggtggccttcagttctcttcccaccttcaccttcagactttctctccctaatcacacctgcttcgggctacagcagctccccagcatacccgtgggctccagatgtggacatccaactgctcattgggcttatctacaaatgtcctgtctgagtaatgacccagccagatgccccatcaacagtccttgagtcctccctcccctgccaccctaatggtcagtgagtccatgatacctcttgagtctactccctaacctgagtttgcatttgaaaataatttatttttagtacaattccccgcgtttccccattgacattttgtattagttggtgtatttgttattgttgatgcgccaatactgataagttattgtaaactacagcccatggtttacagtaggtttcctgtctgtgttgtacagtttctatggggttacacaaatgcataaagccatgtattccctcattaacaatttcatgcaaaatacaaaactgggcggctgttgggtgcggtggctcatgcctgtaatcacagcactttgggaggccaaggtgggcgggatcacttgagctcaggagttggagaccagcctgggcagcatggcgaaaccccatctttactaaaaatagaaaacttacccgggtgtggtggtgcatgcctgtaatcccagctactcgggaggctgaagcaggaggatcgcttgagcccgggaggtggaggttgctgtgggccctgatcatgccaccacactccagggacagagacccgtctcaaaaaaaaaaaatatatatatacatatatatatacatatacacatatatatcaaaatcctgtttttcatggagtcaccctaaccgtaacgctcgtttctgtgtctttcctcctttcccttccctcccctccggctgcaaagccatcatttactgtccctagtcctgggcgggccctgtattcctgagccctctctgtgtcctgctactgcaggtggcacactgctcctccgccgggttgaaaactcgccacacaggcctggagctcggttctctttggctggcgcctcgcacgtgaccagcaggcagccggcagctgtggaagcggagcccagagcgcggcagggcggggccggggccggaaaggcgcgtctgcgcacgcccacagctctccgcttcccggctcgggcgaggctgtgttgattggcttaagacgtgggcttccctttgtatgggccggaggcggagtcctgtcccgccccgcgcctggcggcagtgtcttccggttcgcaagcccgcggcgaggttcgttcccaggctctgattggtccggcggcactgggctcgcgcgcagggtgcgggggaagggcgggcttgcgcactgcgtcggccgcgccccggcrccggtggaagggaggtgtcccaggctcccacggcgcccacggcgccctccttccgccccggccaggcccatgggacccggcccgccctctgccgtccgtccccggcgggcccgatgcctgtcggccgctgagcctccgtccccatgcgggcaggtccgcgccttctgcgggctgcctggcttttggatgctttgaaggggaacaatggagcgaaggatagacggagcagcagggggcagttgcgttcagggccttaaatgccaaacaagtgccctaaaagccagggcccaacactcaggccctaaagtacgggctgaatggggcatcctaggaatagctctggagtgaaaaaaggagtgaagagagcgtttgaaggcaccggctgaggcctttcctgcctgcctgagccctgtggctggctctgctgggtggagggacctttggggaccagtcagggctcggatggaggggcaagatgtgttggggccagctagtgagaggcggggctccctggttccccttggcctgaggcagcggtgggacgtgtgagtctcccgaccaggagcaggttggagtgtgggtgcggctgtacgcgctgtgggcaggggcgcaggctctctagtctcgctggaggactcgaacatcggtacttccgagaccagctgctggaagtccaggtcctgggtctggctagctcccaggccttgaagccccaggtcctgcagacacacacgacgacgtgttcgagaagggccttggtactgggagaagggggcggggagctgagggagtgtttttttccttctgggcaagagaattaattgctcacagttgaaaggcaggaagtacccgcacagcctcccctccccagatctgcaggtcaaggtcatgtgtgcccgcatttgcacagagcctgactctgacatccgtgcacacacacgcctagtacccctgcactagtgcccccacgcccgccttcggaacacacgcctggtgcccaagtgccttgcctctctccccacatctataccccagggatttccctcccaccaaattgaagccagttgtctgcttggcttgtcaaccgcctcccgcctcccgccttcccgatttcccggagaaaagctgctgccctgtggtagagggtggaggaaagccccaccacccctggatgaggggggccccaagacttgcccccagggtagctaagacctcactccgagggggctgcccccctcaggcctatgackggcaggtgcagctgcaggggaagggaggcagagcagtctcttccggcagcaggaagtggtaaccgcctatggggaaattgtggggctgagcagaaggggaaccggagctgaactctcctcccctaccaagggggcctggagggaacggcagccagctgctgaggttctgctctctggtgctgaccttccttccccctcccctctgaacttcccaccccagctctcaaggctccctggggctccctgggcctctctgggggctgacttgggaagggaggaccccatcggatgtctgggggaaggaggcaacccaggggagtccagagcctgggcagcaatggtgttcatggccactggtacagtgggccagcgccccgctgtgaatggtacagtctggcagtggtgaccagggacagccttctggaggtggtgggatggcagcctgggatgccagcttacgttggggctctcacacctgctccggctgcttggcagcggggctttgggcacaaggcagcctaggtgcaggcccaatgggaggggacggcaaggccggggcacagtggggctggaaggggcgccctgcccccccaggagcccctcgcgggcagtgccagccctgggccgccccgccccaccgggagccgcgctgggggcggggctgggcggagcccgcgcagggtgctggccgcagcgcccccaagtcccggcgcygggcccgctcacggccgcgtgggagcagtggggttcgacggcgcggccgcgaggccgccatggccgctcacgggaagctgcggcgggagcgggggctgcaggctgagtatgagacgcaagtcaaaggtgagagggcgccgggcgctcccggcccgtttcctgcggagaacccaaggtcgtgagggagctccaagcgtccccgcgctggcccagggcccgatgctctccccagcgacctctggagcgggggtggaggagggagcctgagccccttgcctgcctcccgacgcccatttggcctcaaccgcctgccattttcccttccttctttcctgtcttccttcctttggtctctgtcctccttgggtctaccgcttctcacccaaggttcagtggagacactggtggccgctggtaaaagagagccagatgcaccaacgtgcccctcagaaggcagtattttagctacagtgaagtcaaccagcttgattgggctggggggtgagtaagggagtccgggtgagtggattggtggagatcacctggccgtaaccccactgcagtccctggagcttcagcaccttttgcctccctttagcactgagggggagcagaggcgagggccactgtctctgggtcaagctggcgcagtgagtcttggttgagagatttaacagggctggcttctcagccttctgaaattgaacctctgggttctgataaacacccatgtgcaaatcacatgcaaatcagctttgcaaattcttagccaatagcttgtgcccatcttattcagggcatggtaactcttgcaaaggaaagaggcagcagctcagtgccagcagctcgtccatatcactctcaatcactccattttaccaattacggaaacaagctcagagaggtgcagtgacttgcccgtggtcatacagcactgcaacttctaggacgtagaatgcaatgacccttgaagtgcctttgaacccagagatgtaggttctaacatcattattcagtgcaagcaatttataccaaagtatgctccagtcctcctttggaaaaggcagcctgtgtccagagccagcttgaggtgactacacagggtgagccagctttccaagcctcgccatcatcttgctcagatggaggtaatgatctccatcctgcttccccaaaatgccatgaagctgaaagacttggaaaacttcagtcagcaaatatgggtcagtgatttcacactgaaaagttggggtttcgagcacgactgtctaagggttcctcacttgctctgggtctgcatcccacaccctggaaaagcttcctaccattctacaaagtggggtcactgtcttgacaccctaaattctcaaaggtcagcatagcggtggttttggagaccatcttttcttctgttttgcttgtcagcagaagtgagaccaaatgccttgctcacaggaagtgctggtggggcccggggcccagctctgtaattcaggcagacatggattccagctctccttttgccagatgtttcctatacatctgtgctgtcccaggccctgggagtatactgctgtaccagagagaaccccgactccagcccctccagccctggctttttacccagagtaaaagcaatgattcaatgaggactcccctgatttcaaatggcgtcagtggccaccccgccctcacatggctcacgggtctagtgggggagacatagactttgcattatgataataagcactacaaagggaaggaaagtgcacggtgccaagaaggggtcggaagagggccagccctagtttagggggaggtcaggacagggtgtgctgacgagtttgtctgaactgagatccgaaagctctgccaggaaagccaccaatgcaatcgacttgcaattcacaagttgcctgctcaacaccagccggtgtgcatgcccggatctggactaggacatggcttccagtcagcttttgctgccggcagtgatgaagaaaggcagcggttccctctgctggttccttctgcactgttcagttgtcataagtccccagggattgtattcctctgggggaagcagggcagggcaggctccagagggccagtgaggcgagcagttgtctaacacctttcttggaatgaaatgaaatttacttttatcaaaaaatgttaaactgggccaggcgtggtggctcacgtctgtaatcccagcactttgggaggccgaggcgggcggatcacctgaggtcaggagttcaagacccagtctggccaacatgatgaaaccctgtctctactaaaaatacaaaaattagctgggtgtggtggtgcgcccctgtagtcccagctactcgggaggctgaggcgggagaatcgcttgaacccgggaggcggaggttgcagtgagccgagatcgcaccactgtactccagcctgggcaacatcctccgtctcaaaacaaaaaatcaaaacaaaacgttaaactgattcagtgaggactctcctgatttcaaatggcattagcgcccaccccacctggccttggagctgacgagttaaccacaggaggccagcctcggataggatgaagacactctccatctgtctcacttggcatcgtgggctctgccctgctctgtcgggaggtcccgtgccccaggcttccacttacccagcttgatctgccggtgggaagagctctcctgttcagtaattcaattggaagggtcaggctcctgggtccctcacctggctagtctggtgggggcagggagtggagggacagagggatgggtgacgcatgcagccagggctggggcacctggagtcaagggggctgagactaggaaggggacattctccaataggagatcaggggaggaggtagggatgctgggcaggcggaacccacagggtccccatgcaacagcccctgggaagtcactggcgggacagaaatccaatgggattgagctcttctcagcggagtcctccctcgctgctgctggtctgaatcctgccgtcttttgcctggactagcacagtagctgccacctgggctccacctggcagtgtgagggggccctgaaaacgaagctggaccacatcaccccactactgtggctcctctctcactcgg

SEQ ID NO: 95854 - DNA, 116267 bp, Homo sapiens
  misc_feature (1)...(116267): n = A,T,C or G
aagccctttgtgctggccccggtgtccaagaagccctgagacaaagaacctgggtttctctctgtatgtgttttcatgtcccattacttggctcaaacttccatctagcacctggcaaaatagaacctgctgaccagcggggcctcctcaaggaggctccaacttaacattgagctctgtgagaaagtggaagcaaaataccagtgagaagcaatagcagtctcgtctgcccaggagcagagtgtacaggttggctttcacggtctcctggagccccactgcacatgtgcctgcagatcactggcagctcccagagagaagctgggggaagcttctgatccctggggcccacaagggtaatgctctctctgtctgggatgtagatcccaggtctcctgcatccaggtaagctctctctgtcctgcccccattaggctgggctctgtcttctcctgcttcgggaatgatagaaatgttctatttcttgattgtgatggtgaacagactgggtagcacatccttgttattttcagggcaagcatcaccactctctccccttcaagaccccagtcctcttagaaaacaaccaacccaccaaccaaccaaaaagagatagacaattctgggcagccttaggaatcttaactgaggctatgtcttcttgtcttcttcccatgcttaaatctcagctttttttttttttttttttttttttgagacagagtcttgctttgtcacccaggctggagtgcagtgcagtgatcttggctcactgcaacctctgccttccgggttcaagcgattctcctgactcagtctcctgagtagctgggactacaggcacgtgccaccacacctggctaatttttgtatttttagtagagacggggtttcaccacgttggttaggctggtcttgaactcctgacctcgtgatctgcttgcctcggcctcccaaagtgctgggattaaatctcagctttattgggccgggcacgatggctcacgcctgtaatcccagcactttgggaagctgtggcaggtggatcacctgaggtcaggagttcaagaccagcctggccaacatggtgaaaccccgtctctactaaaaatacaaaaattagctgggcgtgatggtgcacacctgtaatcccagctacttgggaagctgaggcaggagactcacttgaacctggaaggcaaaggttgcagtgagccaagattgtgccactgcactccaacctggaaggcagagtaaaactctgtctcaaaacaaacaaacaaaaaaaacaaactcagctttaccgaagtataacttatctgcagtgaaattcgcccatctcatgtttatagtataatgatttgggggcaattgtatatggtttcatgatcgtgtcaacaatcaagacacagaacatttctatcaatcacccccaaaactttcctcttgcctctttggagtcaatcccccacccacctctaggctgacctctggccccagtcaaccataaatctgctttctatcattattgttttgccttttccaaaatgtaatataaatggcatcatgcagtatataatattttgtgtacagtttatttcatttagcatgatatttttgagattcattcaagttgtagcatatatcaatagttcttcctttttattgctgagtaatattccattgggtgcatatatcaccattggcttagctatgggtttaatcagtggggatttgagatgcttacattcttttactattttttattattattattattattttgagaggagtctcactctgtcgccaggctggagtgcagtggcacgatctcggctcagtgcaacctccgcctcccgggttcaagcgattctcctgcctcagcttcctgagtagctgggattacaggtgcacgccaccaaggctggctattttttgtatttttagtagagacggggtttcaccatgttggccaggatggtctcgatctcttgaccttgtgatccacccacctcggcctcccaaagtgctgggattacaggcgtgaaccaccgcgcccagcttttgactattatttttgaaaggctgctgtgaatatttgaatacacgtctttttgtgaacgtatgtttccatatatcttggataaatacctaggaatagtattgctcggccatatgtacatttacctttgtaattcactgccaaaccattttccaaaggggctgcactatcctgctgaggctgctttttaaatacagactggggttggggaggaggaggtaggcagagctgctttgcagttctcctagattcagaagttagacctggcattcatgtgcttcacaacaagcttatgaaggagttaatgaataaaacccatttcacagatgaggaagtagaggtttggagaggtgtacttgcccgaagtcacacacctaacaaatggaagagctaggatttaaaccctggaacctttgtgtcagtgcacaggggcttaccccctatcctctcccatctctctccccagtgatcaccgtggcaacttgggaattctgctgccttgacactctatacatcacatttacatctatcctcaaggggacacaacgaccctgggaggtggcattcaacccctttttttcagaggaagcagttaatgatcagagaggtgaagtgactttcccaaggccaacagcttgcctatagaatttctgggacctgaatcaggtttcctagttccaagtgctttctgctagagcatggtaacccacagctacatttaaaatttttcattcctaattttctttttcttcagccttctctttcctcagtaagaatgcccctccctttcctccaccttcccctgcctcaggcccaatacattgaacctggtaggattaagttgaggcaggagtggggactggggagatcagagcatagaggccaagggagaagtagcaggcaacaggccatttcctcgctcgggcctgcttcttatctaggaggtgagaggccagaggtggaggtaagggatgaagccaaccaaatccagagtgcaggctcctcctggtgctgcctagcctgcctcccccaactgcagagaacaggatgaagcctctgaaggtaggaggtgcctccagccctccagcctgtgccttagcaaaagcgggaggactctgggggagaggggcggaaacaggtgtaggctgtgctactcagaagggttgtggaagaagcagcctgaggtcgcatctattgccccctcctctctattgtcctggagccctggagagggaggccagccatcttctcacaggcctcctgcatgatgggggggtgtatgtgtgcaaaatgcagggaagcctgaagattcctacacacacacacacacacacacacacacacacacacacactgaaatgtgagtgcagccccagcctggaagagggcaggctcagtcaagaatacagcgatgtcaccaagggcaaggcggtaacccctccatagtgtacaaccttgtttgtttgtttgttttgagatggaatctcactctgtcacccaggctgaagtgtagtggtgcaatctcagctcactgcaaccttcaccacccgggttcaagtaattctcctgcctcagcctcccgattagctgggattacaggcgcccaccaccacgcctggctaatttttttgtatttttagtagagacggggtttcaccatgttggccaggttggtttcgaactcctgacctcaagtgatccgcccgcctcggcctcccaaggtgctgggatcacaggcctgagccaccgcgcccagcccatagtgtacaacctttacagttttcaaagtgcttcctcatctgttgcctcattcgatctctgcacctacaccgtgagacaggcacggcaggggttactctctccatttcacaggccaaaggctaatcttctctactggccctttctggttgaattgcatctttctagaggtggggctgggctggggctggaccctggaaaaatcttcaggaattacctccttaggatgagaccatccctgctctgcaccttccccacctcctaacccccagctcctcccagctccatcgaaaagctttggcctcatcttgggacacttaaccaggcctattatatgcaaggtatcccaggcagctgctgccctccctccacccatccccattttcctctatccctctgccctaagattcacagataccaggaatccagagttattcagcagcccaccagggagcctctctagcatgcaaatttactgagcgtgctttgaaattcagcacaaaagtgaatgagattcaaaggagttcatagtctggggaggggagttggcagagcagacgtgtaagcaaatgatgacatcagtacaacaagaagggctgggtgggggagacttctaattgtgcgggggcccaggagcagctgctattctgctgtctttccaggagtttggcaaatccaggagagaggaccaagtggaaagggctggaggaaagaaaaaacccagtgcatcaagttccctggaactaggccagagcttggggtgaagagcaaaaagaggcacactgggagaagtggctaaagagtgggttgggttggattctggatggctttgttactcttctaagaagtctagactcttcaataaagcatatatatatgcatatataaatgatatatgaatatatgtgtatatgtgtgtgactatgtagaaacacacgtacacatatacactggtatcaggtaaaatgctgtttttagatgctggagaactaacacatacaagagaaaaaaaacaggtcatgataaagtcatcctatttactcgaactgctcatgtataagtattatgcagtacaaagaatattatgctcatttttctatgtgccaggttgtcttttctttttttaatttttttgacacgcagtctcgctttgtcacacaggctggagtgcagtggtgccatctcagctcactgcaacctctccctcccgggttcaagcgattctcttgcctcagcttcccgagcagctggtattacagacacctgccaccacgcctggataatttttgtatttttagtagagacgaggtttcaccatgtcgtccaggctggtctcgaactcctgacctcaggtgatccgcctgcgttggcctcccaaagtgctaggattacaggcgtgagccaccgcgcccggcccagattgtttgttttatttgattacacaatgaattctcttcttgaagtttgcctttcttctctttttcctgtccctttctttttactgtatcaatagttgtctgacccaaacctcaacaagtagaaggaattttggactgaaatgtttccgttcactaagtctcaattgcgttcttggaaaggtgctggcacagctgagggacaccccagctgttagttgagtttgtgaattgcagatcctgccccagagtcagtgaaatttctttttcccttatactatctcaactttacgcagccaaccctgtgtacccaataatagctcaatttagtggcatccgctaaagtcttgtatagagaagttttccctctggatttcccctttactgaagaaaaatggggagacccagacaagggtcccgggactacgcttcccagccgcctccgcccggcgcccagtccaacttcccttacagggatggcccctggcatcttggccccgcccatccccagcaccatattgcgaactacaattcccagctgcctccatgcgtcggacccttcaaaatgggcttcccagcagcctctcgggcgaagagccccgcccttcggagctgctccccaggtcgacccggcgcactcttcctgccccctgccccgtcacgtgatgcagtcccgccaaccggcacggggaggcgggcagcgggcggtggccgggggcgggcaggccgtggggggcggaccccagagggggcggagcagggcccggcagccgagcagcctggcaacggcggtggcgcccggagcccgaggtgggtgcgcgctcacggctggcctggctcggagccgggcactgcggggacccgtggtgaggggatcgggaggaggaagttgggactccttgggccagcgggtcgcgcggggccttgccgcaccgtcagggttgggtgggggtttcgtccaagcgccgtcgctgtccccgcggggcagggctgaggccagggagcagcaggcaggtacctccggcttcctcccgttctccccgcccaaggtggccggccggcggcgggcgaaggtcgggacgggggtaggggttggctggccgtggagctgggggcggacgtctcagccactgcctggactttgcttccccgtcccggggcggtgagtgggccgggcgtccgccctgcctccccggcgacgctccgcggctggtcctcgccttggccctccgcacggagcgggcgtccgtcgcatccccggtgggccctgcggagcggccgcagcccggcactggccgcgaagcctcgatggccgctctcggccagtgtttctgtgtcatacacgagaggtttatctgcttttgcaacagttgagggaagatcttagagggaacggttagttccctgatacgcagtcggaagtatgtacaggcacgagcaagcgcccgtggccgggttgcctcccttaactgtcttttgctgcgctcaggaagtgaaaactaattttagtatttgcctaagcaagtaagaagtgaatctgctgcaaaaattatattagagctttatagacgcacgcatcgtttgaggcgaagtgggttgcgactggttttgaaacagatacaccagatcttcacaagaataaaattatagcattttagaattgactggcaycctgaagtttacattgttcatttgtttcctggatgggggaactgaggcccagagagggtaactaatatgtcccgggcttcagggcaacttaatggcaaagctaatatcacaagccagctctttgggggtatcttggtgtctgtctagtctggattctttttaccacagctcagtattattccttgtgaaataagcaccttagagtcttgagactgagccagcaattttgctagactgcaaaccattttgaatttccttcaaaatcggtttaccaaccaaataagacaatcaggcctgttactttgcagacacgtttgccttcatccaacatatatattgggcacgatcatgtattcaccagatttgattctgaatggcttttggctgcttcacaaaatcaaatctacttttcagagattccacaccatgggggagatttgaaccagtggtgctgcctgcagcaccagtgtatagtaccctcccgggtgcttgagggtggataacattcacggggggcttgtagattctagtgtagttagtaaatgattggtctctttaacttaaagttctaactacatttattaagttgtcgatggtttcattcattcatcaaacacaagaatgccaacggtgggcactgggaagacagcaaagagccccactgctgaggtccctgccttatagagtttatatgtggggaggcacmcaataaaaaaataaacaatgatatattttctggcagagatgagcgctatgagaaaaaatagagctctgaaaccttacaatgacagtraaacaggctggcatgattgagaatgacttgggcattactttgaatttctagttttagattgccagctgctgctccagtaaaggaaataaatccaaaagtaaatctctgaatcaaagagattttttggagtcatcatttctccaatgagtgtcttttagatggtaagctcatcccagcctcatttttactcacatttccccccaccccgacatgcaaacagtaagtgatttcaaatacctagagaggtatttttcaaatcctttgctgttttcatagttagatagctgactgtagctacagaaagctctgctgaggtcaatattggttgttgatttcatgccggtgtctgctggactctcaggctaccttgcacaagggtttctcttcctgtgcaatggtttgtactgtgaacctcttatctgaaatgatcatcagtccttgtgtggtttgtaaagaaactagttcattttgaaatagctcaagagaaaagaagcactcattcttaggaacaagagtgctcgctaataaaatggcattaatgagagttgactgtaaaagttcatctgtttaataccttctaagttctctcatattctgtatgttcaatggcttcaaagcaaaattttaaacttttacaggtctgaaaaataattaaagttacaaaaaatactttaatattttttgttccaaaatgagaggcagattaacaaaatgtagttacttagaaaccactgaaaacacatggttcttgctcttattgagggctccaaaataaagagaaaagtggagactctcaacgattaataggtgacattttaaaggggtaaccagaggatttcaaaggctggagtttctcatttctaaagtttattcgattttgtaacagaataatagattgttttcattattctttagtaattttcctttcctgttttcgacctctttgaagttctgctttcattattttctagttttctagttctttatttcctttttggcagatgtgggggatagggaccgtcatttgcctagaagattttgactctggattgggcagcctgccccaatttgaatcctggacctaatattatctgtgtgactttaggcaaggtacttaactctgtgctttagtttccttatctgtcaaatgagaataataatagtacctttctcaaagggttgctggagggactgagtgaataatctatgctaagtgcttagaaaagtgtcttgcatgtagtagacactaaagaaaagctgttattgacttgaacgatatggaactcttttgtttttaagaaaatacattattctagctatgtcttaataaacttttggaatccagtagcttgcttttctcgacatttctctgcatttccttgttggcacgagcttttggttccaggcgacgctggcagcagtgtcctccgttcttgcagtgctatattccctttaccatttggacttagaaatttcttgaggccaaattttgttgctacaaacaataatagagcaagagaggccttcttctagtttatctgccttgaaagtgagagtgtatcaggagacccagtaggagttactgagttaggtcccgttgtcatcctgtagttgggggaagatttttcattggaaatctttgcagtgtatttttccactgtgagtaccacgacagtctcatctttttctttttaagaatgtggaggcatctctttagataattggcattgtgtactactagtgctttctatttctaccagaggaactatggtaaatgagccttttgtttgtgtgaggtggtagaaagcttcctgcatttggattccagaagctgagttcaggtcccagttctcttccttaactctgtgtcactggacaagtcatttaaccttgctgctagtggctcttccatctgtaagatagagctaataaaacctgccctgccaagtttccagagttcgtcagagaatcaaatgtgcctcagagccctttgtaaagtgtgcagcattattattattgcatgaatgtgttgtataagcagttgctatttggagaactggtataagagggcagttgtccttcctgttcttggactgtcttccctgtggctgtaggtgtggcctctctgcctcaatctccctcttctgtcatcattaaaatatgcaggtatttatattgcctctttcataggggcctgatgtcactggtataccataacaagtttttgttttatgtattcctaaaatggtagtagtgtataaccaacaatcacagggtgacagcaaggcaagctcagcctcagggaatgttgcctgcctctcccaagtgtctcagaatggaagactttctcttttccaatcgagacctgaccgcagctcctgagtccatactagactggatgcttgtgcttctggggttagaataaaaagcgatccaggctctggggaagagatggttgatagctccccaggtctgtaccatcctccttgctggaacagrgcrggctcctgagtgatagggcaggcgcctgagcggccttttctcgttaaagttgtttctcagtatcttgaaatgtctctgtaagttgcactttgcaatgaatttcatgtacttgtattagtttagtattgctgttccttgactgtttgtcttaataggtaactcctacatatttcagtatgtttttcattttctatgattgtaataaaaagggcgaggttggagatattttttctgattgtctgaaacctaagatggtcctatacacacagtagacatttagtaaacattatttaacttgaactagacaaaggaggccagcttagaattgttcacacatgatcattgtaaccaattctgttgcatgtctagagatcatgctccctgtctgccagatgaaatggagctcatgcttaacctttcttgccgtggtcaaacagcaaatgagaaagttctttgaatcagtcattgtcttgccacccttttcttctcagcttcttgatttttgaactcttggcatgagcagtttgagtacagattagtttttgctttgcttgctagtatgtttggggtgggaagttgaagggggaataattgaaagtaaaaataaaagttgtttgtaactcattcatctcttatccccttgcctccaaaccctgacagcacacagcaatgccctttctttagcatgtgataattgttatattttgatagcatgtccttgaacttttttgtgagaaggaagcattgtttatttcccagagccttttgcttggaatgtaatggattgctacatcagttatcctttccccttcttgggagatgtagaggcagaggtgggttataaggtagattcttagcatcaggtggtggtgctttaaattcccttatatgacttttaaattgctttatggccctgagacaacttaggtggggatttaggagaataggtactatgctggaatccagcaggcctggaattggcccaagctcttttactgaaataagaaatgtacctgcctgcacagcagtgacccttggccatgacatgaaatatacctgcgtgtcagtactgtttgtggataacagtaagaaggaaagtttgcacttggtttcagtgagaccccaggagggcgctgcggttaacacgggttatgtgactaggaggatatgagaaaccccagccagtattycattttgagtttcctggttctgaggtgttccttgcccatgtcagtggttctggatctgggagagaaagcacaggtccctactgccctaacaaagggaggactgaccgttggtgctggcccccacctctttgaatcccttgcttggagagagaactgattttttcaaagttgaagctgagtctaactctgctggacatgtccttccttcactatatcaactctaataatctccccagagattcccattacgcctatggcatgaaacaggtttttcttattgatggggattgccsttgctccccgggagctggtgaaacaggcagaatttcaagccccatcctcacccactgagacccaccaccgactccttaagctgaatgtgaattttaatgaggcccccrggtgattttgcagtaaattaaagttcggaaatagtctaatagtaccagctcatatcctggcttcccagtcctttaagatagcgctagccaatagagaatgtgtaatttaaaattttctagtagccacattgaacaagtaaagaaacaggtgaaatcaattttaatatatttaacacagcatgtgcgaaatatttcaatgtgtcatcgacataataatgacacgtttttccttttttggtactaaattgtcaatcaggtgtatattttacattatagcccatctcagtttggattagccacagttcaagtgttcaggagctacagctgtggagagatacatttggtcttgatttgctgaggatttcatcagattcactgtcaatgcttaaatagccgcctcagtcataatttacattaatattaggtgtaatctttgccaagtccttagcccagtgcttttacatcaggtctcatatgaatcctcacagcatcgctttgaggtaaaaactgttaagatccccactgagtttcagagaggttaggtctaagctgaagcgtttaggaagcagtaatatcaggatttgaacccaggcaagtctgacttctgggtttgcagcctccgctgcaacttcctgcagctctcatgactacagggttttttctcggtttcagtttttagttttgtaagccatattaaaaaggcaccattggtatatgtatgaaatgcaatcttctttcttgaggggaacttcaaagaactcgaggaatgcctctttcttctctggcttttcagagctggtgcagagtccctaaacagaagtttcctcatagagggaataccacggaccaggagattgcctttcctgctgctcattagaatcacttggggagttttacatacttgctgccctgggcatcgcccacagatattcgaacttaattgatctgggctgagactcttgacatctgcatttttaaaaagtggtcccagcgtgcagcactaccaggagcgcttctccaacttcattgccttatgaatcacctggacttcgagttgaaacacagattctgactcagtggttccgggatgggcccggagagctttttcttctcatttccatcaagctcccaggtgatgccaacagtgttgctctgtggctcccactcagagcagcaagccacatcataatcacctgaggggtttttgcaaaactacaaattcctggcatcatgcctggagtttctgattcagtaggtctggggtggggcccaagatctttacttgagaaggctcttgctttcaatgtttcaccataaagtattgtgtttactctaggttttgtgtaggggcacttctagtgtacatttttttcggtcataagtggatgttgagttttatcaagccccttttcttcctttatggagataggtttttggtttgtgtttttgtagagagggcttcttactgtgttacccaggctggtctcaaactcctgtcctcaagcaattctcctgcctcagtctcccaaagtgcttaggattacaggcgtgagggagaacctgtgttttccctccttgaacttgttaatgtggtaggctattttaagggattttctartataactttgtagcattaactaagtttgtattgctgggataaactcaacagggtcatgttctttcttactgctgggtttgattgctaatactttctttaggatttttacatcttatatacataagatttggtattagttttcctgtgctgtcttggtctagtttagtatcatgcttatgctagccttataaagtgagttgagatattccctttttctgttctctggaagtttgtataagattggagttactggttccttgaatgttgctagaacttgcacatggagctgcctggggcctggaagattataaactaccagcaaatgtctgccaaatctatagctgtgtctgtcttttcattcctgcatcctactattgtttgtttgtgccctccttttttctttattagtctaaccagaggtttgtcagttgtggttatggcaccaacttgataatataattatgttcatttgtttcccttttagggcttttcccctgcttttttgattaatttttaacgagtaaaaactttatatgattttgaagtcacatttatttcaaggtatattcagaaaagtcttgctttcaccccatctctgaccaggtattctgtttctttcccccccgtagatgatcaatcttattagtttgttcttctaagtatcttttgcaaatttgagcaagcacgtacatgtattttccccttttcttgcacaaaaacatatttcatacactattcagcctcttgcccttttcacttaaagaatataccaggaatcattcttcattttctcctcctttctttagatttattctgctgtttggatgtttcaaaacatagtattttcatgattatttagttgtgatattttctattatgattatttcattcacctgcgagctgtttagaagtatatttttacttacaaatgtattttctgggtattttcaaaactgatttacaacttaactgcattatggtgaaagaatatgatgtgaacactcgtagttctttgaaatttgtcaaggataggcttatgtggtatttttgtggctggcttctttcacttagcatactgctttttatattcatttttgtgttgttgcatgtatcagcagttcctgactttctgttgctgagtagtattccatagtatggttataatgtaatttattcattcagtagttgatcatttgagttgattcagtttttggccattttgaaaaaaagctgccatgaacattcacatacaagtctttgtgtggactcatgcttttatttgcttcgtgtaaatacttaggtgtggcattgctgggccatatgtttagtktatgtttaactttacaaggaactgtcaaactgttttccaaagtggccatgccattgtgccattttgcattcctactggctttaattgtctgcctttaaaatgttagccatttgactgggtgtataatggtatctcattgtatttttaacttacaaattcctagtgactagtaatagtgagcatgtctttatgtgcttgttggccattaagtttatcttctttggtgaaggayttgctgaaatcttttgcccatttcttattaaattggattgtctgtctgaagttgtgagggttctttttatattctggatacaagtacttcatcagatatgtgatttgcaagcatgttctctcaaactgtggtttgtctttcattttcttaactgtgcctgtgcctgtgcaagagcaaggagttttgattttgatgaagtcctatttactttttcccctgttatggtttgagtttttgtgttttaagaaatctttacttaacctaagttcacaaaaattttcccctgtgttccttccagaacttttttagtcctgctcttatgtttagatctgttttggcagacagatctttccaacccctggtgtttatacctgtgtgatccccttcccttgagtgtgagcaggacctgtgacttgcttctagaatatagactagaatatggaaaaagtgtagggattctacagatataattaaggtcacaaccagtagattttgaattaatcaaaagagaagttatcctgggtaggcctgaattaatcagcacaaaacccttaaaagaaggtctgggtcctccccgaggtgagattctctttgctgacttgttgatgtgagcagccacattgaggaaggccacatagaaaggaactgcaggtggtctctaggaactaaaagctgcttagcaaaaagccagggccttcaaccatgcagcctaaaggaaatgagttctgccaacactctgaatgagcttggaagcagattttccccagttgagcctccagatgagaatgcagcctggccattaccttgattgcaactttgtgagaccctgagcagaggacccagctaagctgtgcctggacacctgacccacagaaactgtgagatgataaatgtgtgctgtttatggctgctaagtttgttattcagcaatataaaaytagtatgtctatgttccatttcaagttaattttgtatattttgtgaagtaagggtaaagattcatttatttttccatatggacatcaaactgttccagcatcatttgtgggaaaaggcccacacattttggtaattttgttgaaaatcaattgaccattgctaggacctcaaaaagaagggcctaattatagtctctgttctgttccattgatctgtatgtctatccttataccagtactgcagtgtcttgattactgaggcattataataagtctggggatcaggtagtggaagtactgcaacttttttttttttttcttttcaagattgttttgaatattcttggtcgcttgcctttccatacaaattttggaatcatcttgtccaagcctgttgggattttgatagggatttcattgactttgtagatcaatattgacatcatgacaattaggagtctttgatccttgagcatgcgatatgtatctatatatctcatctatctatctatctatctatctatctatctatctatctatctgtatatttttgttttgagatggagtttcgcttttgttgcccaggctggagtgcaatggtgtaatctcagctcactgcaacctccgcctcctgggttcaagcgattctcccgcctcaacctcctgagtagctgggattacaggcacccgccaccacacccagctaattttgtatttttagtagagacggggtttctccatgttggtcaggctggtcttgaactcctgacctcaggtaatctgcccgcctcgtcctcccaaagtgctgggattacaggcatgagccaccacgcctggcccaagcatgcaatatttctccatgtatttaggtctttaatttctctcagcaatgttttgtagctttcagtgtgtgattcttggacgtattttgttcagtgtttccctaagtatttcattttttttggtattgcaaatgacatttttaaaataaagttttttgagacagggtcttgttctgttacctaagctggagtgcagtggcatgatggtggctcactgtagcctcaacctcctgggctaaagtgatcctccctcctcagcctctcaagtagctgaagactacaggtgcatgcccccatgcccagctaattttttttttttatgttttgtagagatagggtcttgctgtattgcccaggctggtctcaacttcctgggctcaagtagtcctcctgcctcagcctcccaaagtgctgagatttcaggcatgaactatagcactgggccagtatttttatatttcagtgttcatatgttcattgctaacaatacaaatataattaatttttatattggctttgtgttttatgcagccttactaaatttacttattctagtagtttttttgtagtattcttaggattttttttgcatacatgattatgttgtctgtaaatacagttttacttcttttttccaatatgttatgtgttttgaacttgctagaagctctaaaagatgttaaatacaagtgataagagtgaccgtccttgccttgttcccactcttattggtgaaagaagaaatgctttctaagtgtgatgtcagctgaaggtttttcataggtgcccttgacaattcctgatttcctgagggtgtttttaaaaatcatggatagatgttgaattacgttaatagaagccacgtctcagatacaatcttcaggaagatagcacacctcatgaatagtcttactgactatacatatcaccacatttatacccattcttaaccaccactacccagcttttcctcctagtgtcgataacagaatttccatctggatcttgggaattctttgtggagcagcatatactgctccttcaaaagacatagatcttctctgcgagattcacatgtatcattattttagaactggaatttcttcatcctctctttccttgccattcttttaacactggttttggttcttcttcatcttgccttttttatttctgcctttttttttttcaggttatttctgccccatctgtgaaaccttgtctgccaatagtgccaagttataaaaatatgtacgttcagtcctttcaccttcttctgtaacaaggatacgtggttgtttgtatttgtgactggaagaagtaactgctccaagtatgaagataactattgtccatactctctaggtcatggcaagtctttctccttctgattctcccaggatcctaattaagccatctttggggattccctttgcatactccttctctactatggcaaactgcctgttgggcaagctgctactcctactgcttatctctgctaaccttcaaggtcaacctgctcttgcaagttaggactaattaagatgtatcaagcccaacattctcaacaatcaaaagaccctaggcagcgttccaaaagccccatgtagaggaaggtcaggaagttccaaatccaaattattcaatgtattttggaactcttctttggattgacttcagagaccaggcacctttaaaaaaatatcctcgcacctttaaaaaaaatatcctcaaaggctctaggccaaaatcattttgtatcacctctattaatacatagaatgggcaccggtgctgtatggagcattggttttggtttaaaaattaagatatggttaaagttcatgagatggtaccttatgtagctttaaattccaaaggcagtttcaaaagaataattcaaagaatactttgaacagtggccacattgctggaatttgtgtacaccatcaaaggggactactttgaagaataactcagctatatatgatctgacaggctttttaacaaatgcctcattacatgatagttgcacctcatggggtgttttgtgcactagtaataaaaactttctccttttaaaagatagttttaataaagactaagtggatacaaataaatagtagacaatcaagggttgtgctgtttcagtgactcacagacatggatttcaggggaaaaagcctatttgttgactcatctttaaagtgaagtctagggttcttctttgtgaccatcagattttatcacgtggatgaaattccgaaaagattttttttatccagctgtgcaagcaggaggcatgatgtcctcattttaatatgatcatctatgagagaatgagaatgacagatatctatctgttagtggatgagagggccggtcagattgcctagatttcagttccacctttgacagttattagcagacaaattgtttaaccttcctgttccttgtgtttgtcagttgtcatatgatgatagtaatacctagttgccttttaaggttttggtggggattaaatgacttaatctgtgattagaacaatgtctgacaggtagtagatgatctgtaaatgaaagccgtgatcattagcataagcagatactctgttttgctttaattgtatcacctctgttattgtctttattactatttaaccttttttatacatattaattatctttattgttatctaaacatttgtttgtcatcttcccaactcagtttttagctccttgaagacatatctcaaatttttttggttgaggggagggggaactctccattgtggtccagagtagctgcccactatatagttactgattgtgaactctttggaaacaagatttaaataatgatatatgctgagttaggagtatctcagaatgattggcttgttgtcatttcattatttcttctaaaaaaccatattattatttcagtactagttaatttcataggtattcattgaatgcttatggatagattgacaaatgaaattgttctgaatgtaaccatatgttgacatgaccattttatagattgttaatttctgtagccaacctcctgcctattatgggttgaattgtgtcccctaaaaagatatactgaagccctagtccctatttcctcagactggggtcttgtttgttactgcagttgtagttagttaagatgaggtcatgcagcactggagtagggtggactcctcatccagcatgactggggtccttatgaaagaggaaagcaccatgtgaaaacacagacacacagggagaaagccatgtgacaacaggcagagagattggagtggtgaagctgcaagccaaggaatgccaaggattgcagccaccaccagaagctagggagaggcaaggaagcattctcccctagaggctccagatggcacatggcctagctgacaccttgattttggactttgggcctccagaactgtgagagaatttatttctgttcttttaggccatccagtttgtgggacttctttacagcagccccaggacaccaatagactgcccatctgcttgaattagagtgttgacaagcttgggatttcatttcaaacggtggatttgcctatgttttcatctattatccatcttctccagatactttgatttaaatatataaatataaatacatatttatatatttaaatataatttatataatttataatttatatatttaaatatatattaaattatatatatttatatataaattataaattatgtaaattatatattatataaattataaatatatataaattatatatattatataaattataaatatatataaattatatataaattataaatatataaaaattatataaattatatataaattataaatttatataatttatataaattatatataaattataaatatatataaattatatatattatatataattataaatatatataaattatatatattatatnnnnnnnnnnnnnnnnnnnnnnnnnnnggggggggcgtgcaggcgtcccccgcgccgcgggtcaccggcgtcccgtgcgaacgtgcgcgctgccgccgcctagagatcctgccaatcatcgcgctaaatgtgcacctcagttatccacattatgcgtccgccatgtagtagtgtagatatctttcatatcacccttgtatctaagatatctcttagatatatatcttagatatgcacaatatatatagatatatctcagatatctcagatatatattatatatatattaaatatatatatttaatatatattaaatatatatatttaatatatatataaaatatatattaaatatatgttaaatatataaaaatatttttaaaatatattaaatatatatattaaatatatatttcccatacctgatctggcagcaaatatatttttatatatggcagcaaatatatattttcatatatatatatgaaaatctggcacaaaaatacggttcttatatgcatgctaggaatgggagacgtttccaaagatgcttataaaagcactgtttataattgaaacctggaaacagctcaaatgatcactgggaggagaatggaaaaaccaagtgcaaagcagtggactgctatgcagctgtgaaaatgagtggaacacaactatatgcatcaacatttatgactctctcaacactatgtgagaaaagcaagtggcagaagaatatataatgattccatttacataagacttcagaaacatggaaaatcatattatttagggatgtatacatgtggaaaattttaaagatatgcaagggaattataaacctaaaaatcagccctagggaggtaggttggagtacctttaatgactgatgactaacttctccaaagtcatgaaagtttatgagggtgatgctacatttgtttcttcacggaatactgagtacccaaactgtgctttgtgctggtgccagaatggaaaacatggtccttggccttaggaagttctagaaatctaagagacgggacacaaaatatcaaggcataagtacagggtaagaaatgaaatacaatcgtcccttggtatttgcgggaaactggttccaggactcccgaggataccaaaatccttggaggcccaagtccttgatataaaatggcatagtatttgcatataaccttgcatatcctcctgtgtactttcagtcctctatagattacttataatacctaatacaatggaaatgctatgtaaatacaaataaaaattagtatttgaagtatttttctatttgtattatttgtatttgtattattttttgtcatactgttttttgtgtttcttcccaaatatttttgatccgcagttggttgaatccctagatgtggaactcctggatgtggagggctgactatattagaaatatgtatggtgtacagagaagtggagagagagagagagagagagagaaagagtgtgtgtgtgtgtatgtgtgtgtggggggaggtcaggaaaagctttccatgttttgaagyaggtaaatgccaacaaagcatatgccaacgaagcccctgcttctgccttcaaatgagagtacctagaggaattgtttcaaatggcaggttatctccaaccttttctcctctcttcagttttctagatactgtgcacatccactctagagttccttttttcctccctcctccactactgattctgctcagaagaatcttcatcagtaatgcccaatgcctgggcttttctttggggtcctttagcccagacctgagaaggttcttggaaagtaaggagatgttttgatctggcacctttgttactatcatagttataactatttatacgtttctattcttcaacaattactgttttaacttttgctaaataagttactgtttacttataaatttaaaatgtactttttgtgaatagttctcacaggggaaaatagttcaataaaatgcagtttttttcattgagcagatcagctgggttcatgagttttggaattggcagatgcacgggaacttgatcttgttcctattttaaaactttgtttactggcaggtatttgactgttaaaaaatccattggtgagtttaatgatctgtttaaatgtgtgcagtattgctaggtagcctttgtacattaaaaacagataacctgatagtagttgacttttctaatagtttacttaccatatcactttcaatttatgaataatttctaaagttaccctgttccatggccacagctcatgccactaaagccaatcagctgtcttgaagatgtgccatttgtcgtgaggggaccaagaaatagggtgaagagatcagcccaaatccatcactagccactggaaaaaatgattcaaaatgcattctccactgagtctgaattacattatttttagccaaaggtctttgcaacatttaaagaaataggggtaggtatatcatcatgtttaaaatgaattgtaaatatcaaaattatacagagagtgagattttaaatgaaatactatatagcatcatataattttcaaagaggaatcatcaaaccaaatacactgtagccctaagatttgaagtgaccaagacaaatcaagaagctctaatgcttctgttacatgtgtctatgtggacagtaarccrcttacttgggggatccttttttggagtaaatatagttagatttgtagcctatttttagatatctgagcctgaatagaaagtaatgagatgagatctgtatgttaagtatttcacagaaagattccctgggctaggagtcaagtgttttctttttttaatggaaggaggcatatttgaaggtaaactactgtaaggctgattggagtcttggcaaggttagattgatcatcttagaaaacctgtgtgcagaatggttaggcaatcaaggatatggtatattttgtggacaaccaacctaacatattagcaccagtttggggaatgacttaagagttcactgggctgggtgtggtggctcatgcctgtaatcctagcaccacaggaggaggccgatgtgggcggatcacttgaggtcaggggttcaagaccagcctggccaacgtggcgaaatcctgtcgctactaaaaatacaaaaattatctgggcatggtggcgcacatctgtaatcccagctactcaggaggctgaggcaggagaatcactcaaacccaggaggcagaggttacggtgagctgaggtggtaccactgcactccagcctgagcgacagagtgacactctgtctcaaaaaaaaaaaaaaaagcataaagcatctctggtaggaggaagggaactggtatttgagcatctttgttatgccatctgctgtgctataattttacctgttcctcatgacagcactgtgagggctggcgtcacacccattttacagactggaaactgcagtaattaagtgagagaattgggatctgagacacaaattggtctgaatacagaatcccttcctttttttcaactgtatcacactgttttgtaggtgggcgcatagtggcattttgacaagctctcaatggtggggttaatagcttgttttttagtttaagagaatatgattattatgtacttcggctgaagacggttcacatgggaattattttaacagcttaatgcagggcgtgacagcctgtttttgtaaataaaattttattggaatatagcccatcatttatttacatattgctgcttcagtgctacaacgcagtactgagtagttgcaacagaaatgtctgggtatctggccctttacacggaaaatttgtcagtcccttgttcaaaggaaaatgtataaaaatgaaccaaacttctgcttttgcagatcatagtttattttcatgtgagttgagcacttcttccccccaaataaacaaatatatgtgttaaattgatggtgtacctggtctcaaaatggctggaatatgaacatttatcttggttcacagtgatttggttgaggacgtctcaaggtatgtttcatttttttgcatcctaggtggcctacaatccaagctactttaatgcaaaaaatcagaataaatttatagtaaatcctgtgtttactggcactccaggtacagaactctgtgaatggttctcattgggggtgacgctccccctagaggccaaattggaaatgggggcatgttttggttatggtgtaattcattgaaaaatacattattttattataaatcactgtccttttatttctcctttatattggagttagtacagtatattgattttgtatcatgtttagattgaggatatccatggttttcatttcagcctagcaaaggggactttacagaaatttgttttataaaaagggagtttcgggtctgatggtattgagcaccactgccaaagagatttggcatctttttgaaaacagacttctaagtaaggacaactaccttagaaagacctggaattctgaacggagaggctgcttgttctctgacaaactttagaagtcaagttttaagtctcagtatgtttccataagcagcatctttccagagaaagagcatgattgaacttaacgtaaatgccaacacagagtcataaaccacattaaaggctcatcaaaagacaaaagctgcatacctttgtcactgttttgtttgtatacagaaaagttcagaaaaaccactcagggccattgatctcaactcaggtgacgatgggaaatagagctctccgtggtgtttacagtttgcttgcaaaggccctatgaggcagagatcaaaattattttctagttctgctgcttttagattcttaacataagcgttaaaatggcatgcattttttaatgtttttagttaatgtgtgcttcaggtttgtgtattgttgtttttcatattcaacagaaaaggaaaaacagttccttagtctggaaaaagggcgcrgtgaaagaggtttttgtatctgcctccacagattcaactgaccaatcccagccccctgtactgggacggctgtaccttaatttgaaatgttcatggaaaagtctataagggaagatagcattactcaaattattttcagtgcaaatcgtttcaaaggggtacaagttaaccctgcagttaactacataacagtatatacacttaaatttgctgcccagaaccaccctgcctggaccatcctgatcagccaaggccttgtcgtaccatttcaaacatgagtttgtatgaacttgtggcttaagtgaaatattacactgccaacaactgttatgttccttggccaatccttaattgcccagttcattcactcatttaacaaatacctgttaartatcttttgggtgccagggcactgttacaggtgctgtaaataaataaaacataaaattcttggggctagaggccccaaaggttggttggctaggtgagttgagttctcttaactatgtttcttagtctcaagctgttctactgagattgggaccagtcacgtgcaacctggtttccttccagagaccacttagaagcacttttctgtaggtagaagggactctgcaatgcagggagacctaggctagagttgtccctgccagtaagtcactccaggaccttgtcacacaccctctaggccccccgcatctcctctgtaataggagagggttgggcttaaatcatctcaaaggttattttgggggatcaaaagtgatagaagtctacctctggttagaatgctgtagttaacatatatatacggaatcaacttttaatttttgctttaaagccaaggtagccaaaaatcaacatttttttgtttgttttttaaataaaaaggataaaaaaacttgattgttagggctttgggatgaaatactctgtaaccaaaagggtagctgatttttgtagacttcactatagcttctaattatcatccaactgcctttacactaacatagtcattttatacacgaagatatggatgagctttctttgcttggtaagttagagacagcccagggcttgtacacacctgtctagtacattttccaaagtactacactgctttccattttcctattagagtcattattgtctttttttttttttttttaagcaaaaagcactttataactgagtggctgctagccatgcgctatccctgtattagttaacttttctcctagtatttccaaggtcaggactaatttgtagaattggctaagacattggcattcactagctatccttttgtgctcataaaaattaaaaattttaaaaatactagtaatttgttaacagatacactgtgtggttccaagccctgcatgaatgtattaattcatttgtttcacctaataatgttgatgtaaaatgggggtaatagcaaccaaagcccagagaagttaaataacctactcaaggtcaaatggtgagttgcagagttggaatttgaatgtagtcagctgcaacatttgtgcacaccagcatgatgctgttccagcttctataatcttcagggatcaatcaaaaccattcaacaaagagaggctcactgatgagattttaaagtaagcctcattgtggaactggcacatgttatctggacctttggatttctcggatgtatacttgatccaactattaacagtagtagtagtgtctggtgttcctctaaaaattagagctttagacataaagactgcatattgttcggtttcatttatatgaaattcccaaagtgggcaaatttatagggatagcaaattcgtggttgctggaggattgggagtggtgggtgactgctaatgggtatggggtggggtttctctttgggatgataaaagtgttctaaaattgattgtggtgatgggtggcacaactttggatatactaaaaacctttaaattgtacacttgaaaagggtgaactgtatggtatgtgagttgtagtaaaacagttaaatgaagggaaaatgagggatttcgtcctttatattcattttaaattgaaattttttcatgaaaatcagaaatagcaggaagactcatcattcttttatggcccatgaataaacagggtggtgacgttgactgagttgactgtacaaccaggattttagattttttctactgacttgatagtaagaatttaactttttgttttaaaatgttgacttacattagtgaagcattttaaatattaaagtatctatactaaaaggtagttttatatctgttactgaagaaaatctgcccctaatatatagtcttgttttgtcaatagaaaaatttcagagcagatacatctgacttgctccatagttcatctcatccattctgctatctctgagaataatgggttattttgcttggacatgaacttaaggttagaaaggtttttcaaagcatattttacgattttgtctgaatttaattcattttagtgttattcattaatctttttaaaaagttacttttaattttgcattgtgctacctgtaggtagtttcagctcttctaagttgagtatctctttctataaagacgtattttgctctaattgttaattttcaagcatcagtggtagttgcctagttccagtgttctgggatttggtgaactagtatacatgtttgccccatcatgacatttcacagtattgtatatttgccgcataatcattcaccagatagttgtgagttccagtgtgcgccaggatacagccacgaaccagacagacacaagccttggccttgtagtgttgaactctcacgggggaatcctgacagtcctaaccttgtaagatggcccctatctggccatctccccacctcttcatcctggtggctgtctttttctgtgacttcgtcacctttcttgactatttcttaaggacagtagccagtactgtgaagctgttaaatcccactagattttgtgccaaggtgtgttaacccatttatgcctagtgttccactattggaacgctaagcttgtgggagttatttacatcctgctgctcaaggtcatcaccaaggtctgatttttcacaaaaataatttgcaacctccggcataaatgggttaatgttctccattgctggattttgttagtgtgtctggttgctcttaatacagcctggcaaaaagatatttataaatatccacagtcaccttgttgaattggatgtggtttacctcccgctgactttatatgtatctatctgtgtcctaaactttgataaaataaccaaagcattacttagtgttctgttgttgctgtaatcttcttaagtctaaataaatccttgcgttaaaatggtatttgtgtatgttctgaatagaatgctttcatttatgcctgaattgtgatgaatatgcattatttaaatgaagtatatactttccctagaaaatactgattaaatcaaatcttaccaatttgatttcagtcaaatccatgccactctaaactgccatcatttggagaaaacaaaattcttaatagagaaaatagtgtgagttaaattgtccattcttttttcattctgctcrgctgcctctaaattatctttaaaaaataaggagtatggaaatttgaggcctgttgcacaattaataancattaagtttttttagatggcaattagagcactacgaattaaaattcctggaatgtgtatggcgtcttctgctgagctcycccttgtgcatttagctccccttgtctgttctcccctagtcccctgcacctttattggagctctcacatactgcctgtgctctggttcatcgtttstatgtcttattaccactggggcctagtatggaaatagaacctgtaaagtagtaccgtttgctctcagttgccatatttaagtctcagatgtcacatatgtttgaaattgcatacaaattcagttgatattgaatgttgtgtttcttggtagagtttccaggakggcttctgcatcaacttctaaatataattcacactccttggagaatkagtctattaagagggtaagttgaattttcagatttatctgtctctttccttgcatttattttgatatttgaatattaggtcattttgggctggcctattgaattatgaattttattattcattcacatataaatacatttatacatgtggtttctttattgtctcaccttgttctagaaaagcttttttttttttttggagacagagtctcgctccgtagcccaggttggagtgcagtggcaagatctcagctcactgcaacctccgcctcccagattcaagtgattctcctgcctcagcctccctagtagctgggattacaggcgtgtgctaccacacccggctaatttttgtatttttagtagagacggggtttcgccatgttggccaggcttgtcttgaactcctgacctcaggtgatccacttgcctcggcctcccaaagtgctgggatttacaggagtgagctaccacgccggcccagaaaagcttttagatasaataccttatatgtgttaagtgagttttacatttgtaaatcctttcacataacttcatttttgaaaacctctgtctcgtgaaattactgctagacctcatgtttaaggtactaggcaatcctccacctggaaaggttgctgaaggacatactggaaggctaaggcctgctgagcaggctgctacgccttcctaattattggcattattttctaattatgataaaattgttgcataaccaaaacaaatacaactttaacagaaaatggttcaaggtatccagggggagattgtgtaattagagggagattttggaatgtgcattcaaaggaagggattaatttaaaataagctttattcatggccctttaaggccctaagattatccaccagaaaggctaatttatactcccaccaggtggatagagatgcctaagcaatcagaagggagcaaaaggtgatcttttcattggtatttcttgattactaatgaggttaaccttttttaaaaaagtgtgtttatggtcaggtgaggtggctcatgcttgtaatcctagcactttaggaggccaaggtgggaggatcacttgagctcaagagttcgagactggcctaggcaacatagtgaaaccctgtctctaccaaagatacaaaaaattagccgagtgtgatggcgtgcgcccatagttccaactactcaggaggctgaggtgggagattgtttgagcctgggaggcagaggttgcagtgagccgagatctcaccactgcactccagcctgggcgacagagtgagatcctgtctcaaataagtaaataaaagtgtgtttgttattagtttgcatttctcttgtgaagtgattgttcatgtcctttatttggcttttggggattttgaggggagttcttattgattatgtgttccgtgtgtgtgtgtatatgtgtatgtgtgtgtataatttttttttgagacagagtctaactctgtccctcaggctggagtgcagtggtgcaatcctggctcactgcaacctctgcctcttgggttcaagtgattctcgtgcctcagcctcccgagtagctgggattacaggtgtgcaccatcacacctggctaatttttgtatttttagtagagttggggtttcaccatgttggccatgctggtcttgaactcctggcctcaagctatccacctgccttagcctcccaaattgctgggattacaggcatggaccaccacacctggcttgttccttatattttgataatcagctctataatatgttacaagtcttcttcctgatttattgttggccttttaattgtatttatggtattttgattttgaaatactgaagtttaaagtttttatgtgatcacatatatcaatctatattttctgttttgggtgcctacaaggaccatcctcatctccaagattatatgtttttattgtatttaagtatttttatgttaccagaatcagttctaaacacaggagtaatttcaagaatgtaactataaatcctttgtgtaatgctgctctggtataatgtatagcctatgttaatcccatgttatcctgttttaatcagacattcacttcccttattttgtggttgacctagaactgtggtatttaaaaggtatactgagtattgcatttgctcgttatgcctgtttttagttagtgagagggagtgttaaagggtgataatttctttcctctcttacaatttatataaggtgtgtggttttgcttctcattgaggaaggcattcctggctgagaacagtttgtcttgcccagctggttaaaatgtttagcttgcaagtactagaaaattttttaaattggctaggaattttcattcttgcctctgaatgaaaaaaaaaacattaaagattcagcataacacccctctttgacagcttatatctcacctgaatatacaattcacatttctcttgtttcataataattctctccatttgcatagcctctgataatttacagaagtgtgcacagtagctcacacctgtaatcccagcactttggaaggtcaaggcaggcagatcacttgaggccaggagttcaagaccagcctggccaacatggtgaaaccccgtctctactcaaaatgcaaaaattagctgggcgtggtggcacacacctgtagtcccagctactcaggagaccgaggcatgagaatctcttgaacctgggagctgggaggcagacgttgcagtaagccaagattgcaccactgttgcctggcaacagagcaagactgtctcaaaaaataaaagtgtgcttgtatatatattttttcacttaatactcacaaaactgctctaacggaagcatgagtaacttcacttatgaaatgattgcagtgtgattttggacaacaaatagaaaaaaatgaaatactgctgaaaaaaactttttgcccaaacagatgttagtgatgtgcctcaaatgtcatcagactagcacctgcaacacatcttcgtattaatccactagggcagctgaataacctgaaagacaatgggtagctatggcaaattaggctctgygaactcgcctgcaggttgtagtggttaatattactgtgcccacctagcagagctgtggaagtgattgaatgaggcacatgcttgggaatacctctaaagccaggaagcctagagaaatagtaaagtgatgtgaagaatttgtacaaatggctcctaagacttttgccagctcaaaagttctctgacagaccactcttacctcttattaggacagggatcttagtaaatgtgaggaagtaaaaagagaggaagggtcttagtgaaataggaaacgcaataggtaatcacaatgattttcgggcattgtaataggattctggctaatggctgtgctgttattcagttaagcctctgtggaattgaagttttccttcctactcttcccaaaagatggctgaatatgaaaaaaagaaagctgctacagtgtatgtgtatctatagaacacacttaatgtttactttttatcactttcccgaaagctgttaactttaaagtgcttggaaatgtagtttaaaaaktaatattattgaaaagcatgctagcattatttaatactagaagttgacacatctaattaatgttggtgccagattgtaacttttttgtttgaatttttgtgccagttttcccaaatgctaaatctctaatgctttttctttaaaaaacatatttctagtggcttgtattcctagttgcttaaaaacagtgtgtaaatgtaacgtcattacttctgatgcatctgttttgtttctagacgtctygagatggagtcaatcgagatctcactgaggctgttcctcgacttccaggagaaacactaatcactggtaaggacctgctgacataagatttgcataacttgaggagaagtctggcaggatcaggtggcttcagtcccgcttactctttagcagtcaggcttagacaaataggctacctttgtttagaagcgttaacacagaactctctgcatccctttcttgattaaagagttctttygagagcttcatgctcacaagggtagtgatattcttgtgtctgtaccaaagactgagaatgatttaggggaaaaaaatgtggattatctcttgaaagtctctcattggagccataagctctcatggtttaaggttttaagagcaaaatgatttccagtcaatgatgcatgctttaaaatgataaacttaaaggcttgaaggcttaatcattctcctctttgaaatataggagaacatattgctttaaaatatctttcattcgtcagaaaatggaagttagtatttaggtaatattttgatgttatttttcatgataaacgtatactaaaaggaagggatcaactttggaagggctagatcacyacggcttaagaatatagaagcatctgacagcttctaagccaagtgctaatgttctgggcaaattttatatgtggattaacaccctcctttcagacttcaatgtatttgaagcagatgtgatgaccattgttccagggaaccttttgattaattcagatctgggttgtttagcttaaatggctaaaacctcgtgctaattagatggcgggcctaagcgaggtacctttgggaattagccatacaccatgagaaattctcttctgagtccacaaacttgcacacattctagtcttgaaatggagaccagtgggatgtgttcatcccaatttctggataagagcaaagaagatattttacttttgatcgtcttcatatatgaagttttggtggtaggtatcagcgcctgaaccttaacccaggtggtaactaatggaactagcataaagtagctttattaagtattttttatttagaacttgaagagaaagggatttcaaaatcattacgagtcattaacacattcaaggacatccctgaaagatgagaggcatatttctattataattaattattctgatttagcttctccttatgtktattctaccaaagatgtactattctttcggccacctgttttatatcacttcagtgtttgaaatgaacctagccaaactctattctagactattaaaaagaaaaaggtttggtgcggtggctcacacctgtaatcccagcactttgagaggccaaagtaggaggatcacttgaggccaggaattggagaccagcctgggcaacacagcaaaacttcatctttactaaaaattaaaaaacgagctgggtgcagtggcgcatacccatagtcccagctactcaggaggctgaggtgggaggattgcttgagcctgagaggttgaggctgcagtgagccatgattgtgccactgaactccagcttgggcaatagagcaagaccctatctcaaaaacaaaaaaagacagaataaactggaaagatttctactgctgacatttatttattaaaaacatgattatgtttctgtggttagagattggtagcctcatctctcagtctagtggttagtccgtgagactgtcccaggtgagttgccgtcctctggctgaagtagctcaaatagttacctttacaaccaccttagggtagcagcagcagtattctcattcacttctattgtcaccttgccccaggtagtgacagcattgtgggaaagctcagggaagcactgttagtgcctggaggtggtgtggccccactagttctcccactaccccaactcaacccagcacggtaatgtagaaacattgccagtgcttgctttcagccttttcagtaatttttaaaattgtagttattcttagctgaatagtttatattaaattagtgccatttgttgtgtatcttggtatctatttccattattttagggtactttttttatcttaatagacaaakaakttatttacatatgtcctttcaatggccccattaagkgaagagtttacatcacaaattatcgtctttatttaagaagtttggaaacggtaagtagaatataagaccataaagatgaccctaactgttaaagataatgctaaattgtttctcttctactttgcaagattgactgtgggtcaaattaacatggggtatatttgcttctcaactcttaattttttgcttatgcaaaactcatttaacactaacacttgtatatgtaaggaacagggtcaattaaaaaaagtcttatccctcataatggtgggggaggggttagtaattgtaaccatttgctagtttggagaagttaggtgtagaacagtggttctttgccagaagcacatatgaaacccacttatggagcttaacaacacagtatccataaaagttaaaaataaaaaaatacagatgtcctsgatagactgcatcagaatatccagacctgtggtcctggcacagttatattttctaaaatatcacagaggaagatagtgatgtgaatttctgggtgaagcccagcattctagaacttttccaggtgttcaatgataaagcaccaggtagcagtgtagaactaggatgactatggtatggcttactgccactctaccttttcaatccctgaccatgaaaggtttgtcacagcattttgaggaatgttccatcactaggacaataacatggaaaagagatgccccagaaagggaagagagagtgagtagctgctgtggctgtcactgaaggacttccagtggatgtggtgggttgtcattgcccaggtcagcctgaaggggaggtatattttgataggatgtgaatggggaaagaggtccagggttcacagagagtagcccatcagcagcttctacacaggtgaccttgaggctgtcggggaaatgtagcttttttattgcttttaccccaccattttttaggacagttctaatctagattagtttgtatcttttaatctttttttcttttatggtgttcattattatgtctgaattctgaaaaaatgctgtttattatccccattgccttagctgtgggagcccacttttatagctgccccaacttctggaatctcctctggcacagtgcttgtagggacatgtacatggatcaggccacagggcattttatttatgtgactctgttcaaacttttaagtaagagtggagatgagtgaatgttctagatttccagaatgggaaagaagattctgaaaattaacaacagcgagctgcatgttcacccttggcaacaattggcaaaaattctacaaataatcattttaaacatgatttttaagtccttagaaaagaaaccaaccattgggagtgttattgacacattgtcttgatggaaccaaggccatatgacagacyccggtaaagacacctgggccaaatggtggcagtacacttaggtggagttacagcctatggatttcaggcttaatgctaggaagggtggtcgctaacatcttgctgtgtagggcccttcctttccagcatttctgatgcaatgcagaggagcacatagaagacatgcatttccaatgtatgaaaaaccccatactagccaatgtgtgctaggtgatgggatcagggtttgaaatgatcttaacttggtaggatattggagcaaaactaataatataaaattgatatagataacaattactcagttgttatcagtaaaggataggaggtctgtcttaacggatccaagcttatttgaaccagtaattggatatgactgattaaaaagttaatattcccctaggctgagttaacagaagtataacataattgccagacaaaatgtaacaatagccccatctgaagtgttgtattccaagccagatgccaagttttaagagggacattaacaaactgaagagagttcagacacagataaccaggttagtgaagggactgcagttggagcagtgatcaaaataaatgctgatcttgtctgaagaaaagatgactaaaaagggacatgatggacccatctttgaatatttgaagtgcctttctgtggagcagggattcgatttattctgtatagctcccaagggtcaaattaggatagattgaaagattttatgctaatatatgtgagaattatcaaaagttgcaattaaacattatggtcccttttgctgcttgtactcttggctttttgactcaccctgtgtagccagttccaccttatgctgtcactgatgatgaactggggaagttattcaaactgatgatatgacaaggttgtgtatgtagtgtgacctcaactacgaaaaacaaaaattatctgtagaaaagaggctggaaagaagtacaccaaaggtttcagtatttgggctatctgaagaaagggattatgcatgtcttgtcttcttcctttcacttgtcaatatttttcaaaaacccagaatgaacatgtattacttttacaattggaagaattctcagcaagttttatttttgtttgtatatgatgccctagaggatggagttagtgctgagtgggtgaataaaatgcctgtctgacactgactactaacttatttcttcttccactaagttttacataaacattttgagcaattggccacaacatttagtccaagtataaaagcaagcagctgacagcagaaaacatcatataaagaatgccatttaaatggttatacaggagtctaaaaacatagtcatcatagtgtttcttcaattaaagtcctaagcaagaacattaactgtggattctgctgcaaactgaaaaaaattttgttgcatgtttgacaaaaagctgtcatctcactggcgttttgaagtggacacctgtttgtttcaggtatgtaaacactgcagtaggagtgatgagtccagatgtgtgtggtctgattctggagtcagctctgctattttgtaaggagtcaagggcagattccctgcctcctgttgcccagagaagtagagaaacagtgtccatgtcctgagattgccacagtggcctgcttctacctagccctccttgcctggtctgcccctgcattctggcccacrccccgtctccagcgtgttcgtccttagagtgaggccgaccagcttatttctcagttccaaaactatcatcggttccctgttgcccacagagtgaaatccattctcttggtatggcctaaaagtccttctgactcctccaaccttgactcacatcacttcttcccaagtgcattgttctcaaactacgcagagcctttccttctcccatcatgcatgtgccattctcacggaacctggatgccctttctccacccctttcagaagctgctagtcatccttcagawcctacctcaagagccacaccctctctggagtcttccccagcttctcttgaaggaatcattccttctttgtgtccctgcagccttttcttcatgcctctgtgttattaacacattgctatgaaaccttccctggccctttagctaaacttttaatatgtcttttctgtgtttaatttttctcttgagtgcttgtcactgtgtcctatgttatatatttcactgattcatcttgtttgttgtctctctaaggacaaggatgcttgtctgtctattcactgatgttctttcagttcttgggaaggagtctggcacattgaagatgctaagtcagtgtgtgttgaatgaatggattctgtcatatttatttgctgctatgtctgtggtcttatcaaatgctgagtccatttggtccttcatgcctagctagtacagtgtcctggtagacagtaatacacagtaaaagtgtattgagtgaacttgggaggaaatgggctcctaagttgttagtgctgctcagagggcaaaggcctagtcactgtggtttgaccacagtatggctcctgctacattgtggcatcttgaatactaacattgcttctggatttgagaaatcccatagctaccttttggccttgagggtactaaggaatttggctttgggttaatgttgtgactatagtagggcctactgtaggtaggtgataccctgtaatctggtagactaccatgagtaagactgctttcaggattccttccaggagcactttgtgtttaggtgctctagtgcatgagaaagataccttaaccctcgttcattcaggcattcatgtcttcattccagaaacattcactgagcaccatggtgaatttaatactgtgcaaggtgcataatactataccctgaggcctgcataacctcataggatatagagttgagtaattgtggtataatatgacaaagcctacagtggtatgcatagtgctgtgagaaggaagaagacgtacaagggaaaagacgattatgccagtgtagcaagtcatagaatgctttatagaggagatgatacttgaaccaactcttgaagaatggtaacaattttctggacaggaaggaaaaaggagcatatcaggtagagagttaccgtgtctatatggtacttttctgtatcgcatgtataacaatatggaaaagcaccatttgttatgaagatggttgaatgatcggttggagctggaacattgggggttgatggaggagtggggaacagaagaggatgaggctggaagaagagccagcagccttaagagtctcataagtcacagttaagcagtatgcaagttacacagacaatgacatatccaatgtgatttcaggaagagaactccagctgcagtgtgtgtgtgatgggttaggggcgggagagactgaagtcaggaagcccaactaggaagttattttagtttcctaggtaagtgataagggccttaatacagtcatagtggagatagaaaagaggggacagccatgagagatttggagggcttgagtggccatttggaagatggagttgaacaaactttcacttgaaagataggagctgctcccattcatctgaatagacatattacaggagaaggaatatgttgtagataagcccaatggggaaattagtctgaaggcatggacttacagctctacaactaccacgtggaaatggctcagaagcagttggaaacctgactctgaagcttctgaagtcattagcatattggtagcactaaagaccacagacattcatgagctgggaagagtatgtaacataaaaagatatgggctaaggagaggaccccgggggacatggacacttttccatggtgcggagagcgagaagagccagtggagacaaccaagtggcagcagccaaagcagtagaaaatctttggataaagggctgtgatggaagtcagtaggagagagaatctcaagaaggaagggagcagaccatggtgtgaaatgttgcaagtttcagtaagataaagaatgaaaagaggccatggagtgtgtggccaggaggaggctcacaggagccccagygagaacagattccatggagatgtgagtccttgggtctttctcgcagtcctcttccaccttggtctttctgtaaagattctgcagcttccaggcctcagcaagctgctctgcatttattcttctccccgtggctttaagctacccccttggctttagtcacttccatgcacatgaaattgtatagtaacaaagctccttagagtttacccagcctttttccattgactctttcatctgagcatgacaacagctgacagataggcaaagcagacgctaccctagccatgttttttcccctagtgctacctctcttttgagccccagtttctctttccttactgcctgctggagatcccttgagttttcacctggcatcccagactcatggtcaagctgaaattgttcaactcaattgtctccctcccccgagttccttcttttggtgttcttgtttctcttaatggtgccattttcttctcatcaccctggagtctcctctgtctacccatccccacttctctgtagacttcatcacatttgcctcatcctttctagtcacgttgccctaccctcatcctcggtgtctgtctcctaggccctggcagtctccttcagctaggcctccctgacttctgcatctctcccttctattctatctgctccctaagacatacctgcaatcttctcattcccttactcagaaactctcctttcctaccttatcgcacattccctagccaggtgtmcacggtcctcaccactctgctgccatcttatcttcccagcattgctctttctcccctcccttgtgtatacaccccgtgctttggctcccataagcaacttggtcttcctaaacaagccctctgcctcctcacctgtggacttctcgtgcagccattttgtccccctagagcatacattcatccccaccccatctctgccatttgcccccgactcctcttaaaaatcgttccgaagtatttgctatagaaagcttatgaaaaataacataaatgtctgtgggtccaccacccagctgaaggaattccatcctttcctccctcttcacagcagaggtaatcaccatccaaaagttggtatttctcactcgtggtcatttcacacatccctttttaaaatagaatggaatataggaaatgtggaggaagctaaaggaatgggggcttttaaggcttccagtggagcagatcctaacccttggtcagtataatttggctctaggttcaggactgctggcagggtgagaaacatgttggatatagagttttcattttctgaagacaagtcagaaacagcacattcttcctggattaaattcaaggacaaatttgttgtttggcytttctctaaaagatagtgacacagtgattcaattcttcaggcagtgtattacccaaagattcttgaatccttttcaatttgatggctcttttgttgattctctataaagatggagcatacagtgttaacttttagttggtaaaagtgcttctgtgaagaactatataatgtggcctactttgtttttctgatgagttgccagtgcaaaggtaatatttggagaatcaagacgagtaggcagtttacatgtctgtcaaactctgtctcaaatacctggttatgaaatggctttcagatgggtgctgggtgttgtgccatctaagagctgggtgtggaacaagtgcagcagtactcgggtttcctcatctctattggtggctgtcattggatctgtaagccttggatactaccaggaagggaggcagagtttacctttcagtgtgagcatttcaaagccagacctatattctttttcagagggaaggccagtccacttaattacaagcacagccaaaaaggattcctgtagtattttttccttgaagaaaaaaaaaaaaaagcattggaaacttttcaagactgtccttttcaggtccttctctctagtggatttggcacctcttttcattttatggtaggtgaaataatgctaaatagactataataaaacaccctagtctgtccataaatcggaacatcagtgggagcataggatctatgctataggtattattttaaacttccagtcttaaatcatcttcttatattgctgctgcaaaatgaatgccttcttcacattaaaaaacaaaacaaaacaaaacaaaacaaaaacctaattcctgccagtacccttggttcctttgtcccttgtccccatgctaatccccaaactttagggtctgtaagctactaagctctgatgttgaaagtcacataacaggtttaattaattagttccactacaagttcaggctttcagaaagggtctcatcgctgctttggcaattccttcggtctcagattgacttctcactacaccttccaccactacagtgacaaacctttcatgctctttggctaacctcatctcttgttctgttgaaaagtccccttgtcaccacctaaggaggtctaccttcacccattttttcctccttccctcgcatctgagaggaaggaatcagacatcttattttccaaagtgaatcccattctttacacctttctcctctggagtcttagttccccattggttattctgtgtcttacatttttggttttcatcatttttgattctccttccccccgctctgtgaatctgctcaacttccttcccttccttccttccctcccttccctctcttccctttcttcccttccttccctcccttccctctcttcccttccttccctcccttccctgggttccctcccttccctgggttccctcccttccctcggttccctcccttcccttccctcccctccccctcccctccccctcccctcccctcccaaaatggacagagctgtccattttgagacagctctgttgcccaggttggagtgcagtggcgtgatctcggctcaccgcaacctccacctcttgggttccttgggttcaagagattctcccgcctcagcttcccgagtagctgggattacagacatgtaccaccacagccagttaatttttgtatttttagtagagacattgtttcattatgttggccaggctggtctcggactcctgacctcaagtaatctgcccacctccgcctcccaaagtgctgggattacaggcgcgagccactgcacccagccttgcccaagtatctttatttgaaaacaccttcttgtattcctgctaccactgatactatcatcctctttcttccccttattgcacaaacttctttaaaaattagtccacacatgctgcttccacttccgtactattgactccttacttcttgtggtytggcttctgttccctattgaaactactttactgctcaattccagtggccttggttgagttcttgacttttaaatttctatgcagggattgattctgttgactgctccttcctttatccttttccctatacattcctggctctcctctcatttctgcctcttgccttctatgcggctcattttttctttcctacctcctaaatattattttccccagagttctgtcctcaccctcttttttctccattgtcagttgctttccaattctctagctccagttccaatctttcattctgtattcattgagtatctgagagtccagtatgtgttaagcactatgccaggtgctaggatatgatggtgagcacmgcaaacagtttctccctcacgaagcttatagttctcatgggattgataaacattcttctgatagtcacgccaatatataataacaagctgtgatcagtgttgcgtgggagtagtacaggggcacaacagtttgaggagcctgggaaattgtcctgagaaaatgcttgacctggggtctgaagaatacatataagttccctagatgtgagtcaggggctggggaggtgagaagaagctgagagaacagcatatgagaggacctgagaccaaaggaagcatgaaaaatgacagtatggctgagttgggggagaatggcaagagatgaggtgagagaggtagatggtggccagatgtcctcggccttgcccaccctgttcaggatttggggtttttattttttcatttattcattggattgattgatttgagacagggtctcgctgttgcccaggctggagtgcagtggtgcaatcatagctcactgcagccatgacctcctgagctcaagcagtcctcccacctcaacttcctgagtagctaggactatagctgcacactaccatggccagctaatttttgtattttttgtagagatagggtcttgctgtgttgcccaggctggtctcaaactccttggctcaagcgatccgcctgcctccgcctcccaaagtgctgggattgcaggcataagccaccatgcccagccctttaatttattttttaattgacaaaaattgtatatatcgtgtgcaacgtgttttgaaatrcatacacattgtagaatgagtcaatcaagctacttaacataagcatggcctcacatacatattttgtgtggtcagaacatttagaatttactctcagcaattttctagtacacaatagttgttagttgtagtcactttgttgtacagtagatctctggaacttactcctcctattaactgaaattttgtctcctttgaccaacatctccccattgccttccccaggatgatgatgatgatgatgatgatkattattattattatttttgagatgaagtctcgctcttgtcccccggctagagggcaatggtgtgatctcggctcactgcaacctccgcctcccgtgttcaagcaattctcttgcctcagcctcccgagtagctgggattacaggcacctgccaccacgcccagctgatttttgtatttttagtagagacggggtttcaccatgttggccaggctggtcttgaactgacctcaggtgatccaccmacctcggsctcccaaagtgctggtattacaggcgtgagccaccatgcctggtcaggatttgggtttttagagttcagcaatgagaagcttttgaagcttttcacaccactttcaaagtggtgtgagccaaggaatgataacatcagrtgtgctcttctaaaagatcaccctggctactctagggggaatgatcgtagattttgagaccactgcaaccacggcagtggcccagagaagttgctggtagaattggagtggttagcagagttgagactgatttaagaggtagacataggagactggcttaaggatagcagagaaggggatgccaggggtgacttctaggtttctagctttcgtaaccagccactgagatagggaactttggagaataatgtagtttggagagagaactgcatttagttctggacatttttagttcgaggtacccttgagatcttgtcagttctgtatatccagccatctcctgggtatctgtacttggttcatttatcataatctcaaaccaagwgtttctaaaatcggccgtgttcatctttctctaaaaccccctcctgtgttcttcacatcttttggtggtaccaccactatttatcccagagatctgggcccaaagctgattcatctttgagtcttccccagtggctagtctcttttgctttctacctcggtccttctctacttctagatcctcatagcctctcacttgtactgaagtatcagctttcatggttttgaggagtggttgtagcccacttcttgctagtccagaatgctcagtgctgccagatgaatcttcataaagcaccagttaatcatggcattcctgttctccagaagcatcctttagatctcagtctccctgatcctagccgtgtagtactccccaggaaattcccatcaccgttgctgaaacctggcctatatttttttaaaataaactctccatgcttttcccacatgtgcagctgatgtgactcttacttgcttctcaaatgccaatctccagttgctcttgatccatcctttaaggatcatttttaatgcagtcattgccacagaaccttcatgctatctaatcatcagatatggtttgccctcctttgacctcccctttcactttgtgtggactttgcctatggctcttggcactagcaacctggcattgtagttacttgagtccatgtgtcttatctcccagatagagctaggccctgaactccatgtgggcaactctgcttcttaacttcatgaaccctagggcccagtagagtttctgttacttagtgtatgagacagacagacagacagagacagagagagagagagagaaagaaagaatgcattattttaggttatttaactcccctattttcatgtcaattactttaggtagttagaagtacaaggcatagacttttgagttagaatgggcctttgaaaatccttaaatatttaatgatatttagatactgatgactcaggtatccagaaagttcagctaatttgcctattcctggatcttgcagtttggcctgctgggttatctgaycttgaatgtgtcattcagggagaatgtagcaagtaaccttattagacggtgggtgcctttggtcagaagctggctggttctcctcagcgacctgttttctttttttctgtgtagggccagggctctttgagctatacagtttcctctgtacagagacaaagagtagcaaggtgttagctcacttttaattcttccacttttttcaaacatccttgcttccatgttgatgctagagtatcagacttatttagtgtctattctgtgtattttatgtataaatttgacatttaagaatacagttcacagacactcaaatgtcaatatggtatatctaagcataataacagactgatactgtgttttaaataactgcactgtatcgataagtaaatacatgaaaatatgctgcttatatacgtacactgttactgagtagtatttttctctttgggcatttaggtttcagtcatgtcatgaggtgtcttaccccgtgacattcctccttataggtacaaacagtaagatctgttagatgcttgctagagcatactgatccactatatttgaagagcacaattacatcttccaaatactaagatattctttgccataataataataacttccattgttttctagctactggcatcaggcacgacgccaggtactttaaactcattttctgtaatcatctctactttcagataaatgtgactgagtgatagtaactcaccactgttatcagctagtaaatgtcaggattcagattgagccagttttgtccgccttaagagcttgtactattttctctacattatgataattatactcgtacacttttttgcttttttattttgaaataattatgagctcatagaacttgcaaaaatagaagaggtcctttgtacctattactgagttccccacaataactatatccctttatcaaaaccaggaagtggattggcacaactagactgaccatacttgaattttagcagtatttttcccgcactcactttttgtgtgcttttgtgcacagttctgtagcatttgatcccaggtaaccaccatcaataatcaagacatggaactgttctgtcaccacaaaagaactcgctcgtgctgcccgtttagagtcgcgctatccctcccctcaacctctgcaaccacttctctgggttccctctctacaattttgtcatttcaagcacattatataaaaggaatcatataataccttaccttttaagattggcatttctcagccaagtgtggtggcccacgcctgtaatcccagcactctgggaggctgaggcaggtggatggcttgagcctcagaagttcgagaccagcctgggccacatggtgaaaccccatctctacaaaagtacaaaaattagccaggtgcgatggcatgtacctgtagtcccagctacttgggaggctgaggtgagagggctacctgagcccagggaggttgaggctgtgttgagatcacaccactgcacttcagcctgggtgatggagtgaggtcctgtctcaaaaaaaaaaaaaaagattggcgattttcattccacgtgatgcccttaagattcttccaggttccatgtatccatagttcattcatttttcttgctgagtggtattccatggtatggatgctcgcagccttacactttttgaatttctagataacccatgagctgcatttatattttatgaataactgcttattttctgtattgtattttaatataaaaggccaggagcagtggctcacacatgtaatcccaatactttgagaggccaaggcaggaggattgcttgagcccaggagtttgagaccagcctggacaacatagtgagacccccccaccatctctacaaaaaatacaaaataattagttgggcgtggtggcatgcatctgtggtctcagctactcccagctactcaggaggctgatgtgggaggatcactcgagcccaggagtttgcgaccagcctggacaacatagtaagactctgtctctacaaaaaacttttaaaaaatttggctgggcatggtggctcatgcttataatcctagaactttgggaggccgaggcaggtgtattacctgaggtcaggggtttgagaccagcctggccaacatggcaaaaccccgtctctactaaaaatacaaaaattagccaggcatggtggcacatgcctgtaatcccagctacttgggaggctgaggcaggagaattgcttgaacccaggaggtggaggttgcagtgagctgagatcgtgccactgcactccagcctgggtgacagagtgagactcatctaaaaaaaaaaaaaaattaagtgtggctggtggtgtgtgcctgtggtctcagctacttggaaggctgaggtgggaggatcccttgagcctgggacgtcaaggctgcagtgagccactgtactccagcctgagcaacagagcaagaacttatctcttaaaaaaaaaaaaaaaggggggaaagaaaagaaaaactttgtagccccaaaaggtttttaargaacaaaaaaccaaataacccttaaaaattttttttctttatttttcaaacttatctatcacaatatgaaagaaaagtttggattaaaaatggtgtagcccttcatgtctttgtccctgtaaatagatatttcatgttattgtagtcaccgtgtgtgttgtatgctgctgtttcccacttaaacttacttttccatgtaccataattattttaaaaactgtatacttgttccagcgagttgastataattttttctaccctgttatctacctctagctccattgaacatcttccttctgttaagtgatagccataagttcttagtagcgaaattattggatcaaagagtaggacaatttttatggcacttttaatgtgtgttttcaggcattgcctcgagtctcaaccctgccctatacttactaaacaagttattgaagctttgaaaaacttaggaaatggggatacttcacctatatcctggarcggttgtgaggataaaatgagatgatgcgtgcaaagcccctaatgtagtacctggcacagaagagaggtatttcctacatggcagctgctgtgatgatctcctggtgatgattgtgctattacttgactaacatgattccatcatgccagcagtcttctagaccacttgcacccagcgttggatagcaaatgatggagaagccttgctgtgcattaaggcccttctgctttgggaaatgcacgcatgccagagacaagcaccatttccagatgcktggtctctagtgggggaatacatatgtgtaaattcgtggtaacaaggcagagtgaagcaagtggttaacagcagtcggaatcaagtgctatggaacttctgaggaaaaagtgatgaattctgcctgatctaattgggaagcaaggcctcattagaggtgatgcttgctgagccaaggcgaaagtcatggggacaattttggtagctgggaaagacagatcattctaggcaaagggaacaccctgagcaaagcaggtggcttgatcgtagatgaagcatctgaagaatgaagaagtttacttagttggagtgcagaatatcgtgggagagaatcccacagaaacaggctggaagtgatatcacggacgtcctggaaatgtgtacckaggagtttagtctttactccagaggcagtgcacaatggcaaatgtttggggatgcattttgattgcataattgactgttttaatgcttgctctgtcatgtgtgatctgtatcatatttttgttcataaagtgctaaaagggccaaggtaaaatcactctgaaagcatatggttgtttttatatgttttttgatgttttaattatactgacagaaataytgactactgtatttttgtccattacaggattcttctctaatacttgatgttcctctgggtgtgatctcgagaattgaaaaaatgggaggcgcgacaagtagaggagaaaattcctatggtctagatattacttgtaaagtaagagattcgatactttcttatgcaaagaacaaggcacgttagtgttgaatgatagtagacaattaatgtggatttgaaaaaaaaaaatcaaaatctcatgttsatctaaggccctggaaatggttcttcccttaagaacaagcttttcaaaagtgcctgggaaatagtgcccacgtgagggacccactgcaatcaccaaatacaaggactcgaggaactggtcagtttgttagcttgactgagtgggaagagaactttatagataaaatttcttaaaccactttagtttttgctccagcttgctcctggcgccccttcatgtcatatgttaacatgaaggaaggaggaatagaagagattttgccctctgttaacgggatgtgtccttacctctaataaccttcgtaacttttgcttaggtcattttcagaggtacactttgctgtgatagtaaccatgtattgaacatttgtgtccatccaaacacatgctaggtgctttgcatttgatcctcaagtgcaaccctctgagatggcgtgatgggagcccgaggctccaaagagttgggtaactttgctaagataatttctgaaggctgggacccaaaaggtggggatgtgttcaagcgtctcgtgtgactatgaaccaccagtccagtgcagggctttgcagactttttctgtgaagggctcagtagcaaatattttaggctttgtgggccacatcagatttctgttgtgtattcttctctgtgtgttgttttttcaacccttttgaagtgttaaaaaaaaaaaaacagtcttaatttgaagacctgggctgaagtttgctggcccctggccaatccaagtcgttcattgtattgatagagaagtgaggcctttgctgtgtgagattacttgccttgtgttgcctagggagccagcggaagagccagaaccaaaaactaagtctcctttttctagtctcatacactgcgatttctcaaaaccaacattgtgtgcttatatttggattatgctgcaatatggtgtttttctttccgtttataaaagatcaagactcgttttttctatcagaaactaaaggataatgccattattaaatcttaactgaaattcaccactaccatccacctcagcttttttttggtggtgttttaattcgagctaccttaatgctttatctattatcccagctactgtctaccctttggggcctagaaacatgggaatttactttgaaggaagacttttgtattttgcataaaaggatttatgggagtagagtgtttaatattagagtgctcaagggaaaatggggttgctatattgacagttttgaggtgactttcattcttacagggtttaaaaaaacctattttctgccttataataggaaaaacttgtacttaaatatcaatccccccaaaattaatgagacaaagcacattttcacccttgactatttacgaacaaaaggcgtaggaacaactcaccaagcataattctgaaatgttacatatgtatattttttggagttagcatgagcccaaaggtgatggcttagaacaatgttgtagcacaaccttttaactaaattgtctccccagaaacactgacgtcacagagtcatattccattttctcagtaacaaacctgacattgatataaaggaaatctgcttcggtgagataaaagactcactgtcctgtctctcataggtcaactttcgcctgcagtcaataaccatgatacaaycgcatttctctcttgaaacaagtagttacaactcctataaatttggctatgccagcaatgcacatagagatttctgcttgccagtagcaactttcccatggtagatacaagtcccagaggatgttgtccagcagcaggagaaaggtagttctgaatatgcaaattcttaccctgcaggccccataccaacccctggtgcctgtgtggagtctttcaaacaaaaaaaagtgaagtaaaaccataccaccacaaagccttctctttccttccccacctcactcccatgtactcgccttaaagacatagtgtggcattttgaagtcagcagtcatgtgtgttgtttctttagaaatgatgcctcaataaatcaactcttcagagtcgttgcagcagggatatgtattcttcaactcttactgtagtgaggcttggaacatcaccatatgacccggctgttaaaaaggctgagggtctgactaggagactcttagcccatgtggatctttccctgmtgagtcaaactctgaggagaccaggtggaacttaccagttagtctgtgctcctatttctgttacagatttggtgatctgccgcctgtgagtcatttgccttttctrcttcagttttgttggcaagaaataatattctgtctttaattgcatcttaatcagatggcaaaaagaagttacttgaatcacttgtgctttggcacattaaaagtagctgtttgaatcactgatagatcagaataaatattcatgtagagatggtctaatttctggccaagcagtgaagagaacgatgttacagagttaccatctgacttgcggctgttaggaagaaagttcctcacagggcctgagccctgagaatgctcagctctccagtattgcacttgtggctggtcgtaaacccttgtaatgcatatcatcccattgaaatgattattccccttatttaactgttcatttcatcacaaaccaataaccaatagcccaattttcttgggaggtgatatgaatgggttgttggactttattctgtgacatgctttttaaaaaagcatggaatcgtggagctggcaaggcctagtagatgtcatctgtatacagagtgctcaatctcaagttctttattagtggtctcagactttagttcttcatacttcatttgctgctatttgtgtttgagatgtcttgtgaaggccatagcctgtgctggtccttcagactgaagacttgggaagcgttaagagtgctcttgagataaggaaggaaaaagcaccttgaaaaaaaatgaagactgtgatatccaagagggcaacaactaggtctgtaccgctcctgaagtggctccayggtccagcacagcactcctttatctgaaatgaaagtttaaagtgcactgcagagcatagggttccaatgcagagccatcactcagtcacagcactgtaattgacttttttttttaagatacaaccttaaaaaactccagtcttgaaaataagatagaatgttacatctgtatatataatacaaattgacatttaaaggagcttatttggtttggatttggtttaagacaaagttttcctgcttattgaacagatatgtattggaagctacctttaaaatctggttttgactgtttatttttagttcccaaaagtgtagttactactaatatgggctactttaatgtggcttatatggaactctgtgaaggtaaaattgtagaataaaaatatatgacttgcatgagggcttaaaatgtcagtcatttaggaagagagcttctgtattttaatgacatgtttgacaatgttgagattatatttgatagcaggtactctttagaaaagttgtttgaataaaatagttttataattaaaaaaaatatcagggccggatgtggtggcttgacacctgtaatcctggcactttgggaggccgaggcaggcagatcacctgaggtcaggagttcgagaccagcctggccaacatggagaaaccccatctctactaaaaatacaaaaaattrgctgggcgtggtggtgcgttctgtagtcccagccactcaggaggctgaggcacgagaatcccttgaacccaggaggtggaggttgcagtgagccgagatcmtgccactacactccagcctgggccacagagtgagactatgtctcaaaaactaaattaaataaaataaattttaaaaaatttaaaaatacctcagaacccagtgaaagtagatggatcatcgtagatgttgtgcaaggcaaggtttgatttttttttcctttttataaaatgaattttagctctgtcttctccttagtgctagttgctttatcttgtcttcacattcatggctatgayggaaatattttcaggtgttcttaagccagatataccaaattaccatataaaacaaagcaattttgtaataatttagattaattgcccttttrggtaagtgaatcttctcccttaattgaatggaagatttcttgctaattaacatgactttctttgaagactgaactgtcatacttctcctttgcccccaggacatgagaaacctgaggttcgctttgaaacaggaaggccacagcagaagagatatgtttgagatcctcacgagatacgcgtttcccctggctcacagtctggtaaattccagtgctctcctcagcgtgggaaggttctcagtgcctcctctgtgaaaactgcctgcaaactgggatcctctttcttttaatgtctgtgttgtgtttcccagtgtgatgtgtctgcagaggtgtttattaaataatttcatcatttccagagggaacaggtctctcccctgtcagtcaactttggagctaatgagcaatgagtgtcaggcttttgtggctccaattgtaaatgggaacaaactctctgagcctaaatgccatttgaacaaatacagatgtgtggtgtaggtactgcaccaatagctgaataggggcagttttatttttgaaaagaataacctttcaaatgtcatttgatagcatttattatgtaattgtcaggaccaatttattatgcatttaattagttgtaatctatgacttagtccaaaggtgattcagtatatgtacctaaaacttttccttcctcttcaccaaactactggagtaaccttactcttactgcatgactgaaataaggctttctatgagttttgcttgtagaacaatctttctttatatcctgcctcggccttgcctccttttttactgccgtgccttgcttgaatcttctaaccccagtcctcctcctcagtttgacttgaacttagatgcaaatacctgctaaggggagagtgaaaaaataattatttacaacatatactgtataaatgcctttatcttaagtataggatgatcatattgcagactaaaccgaaggtgatggaagggacccttaagtagaagaggcatgtgttgaacgcagatgaaaatgtaatgcttgggaacaaatgtgctgatctcataattgaatctattttcagccttttctaagtttctgattaaatatgtgatttttaaaaatatgtctatattagagkttttaattctattaggataaaaagagagtctgatgggaacacatcttcttaattattatgaaagtgagaatgtgagtctaattgatgaaagttcaattaggaaatgtgttctgtcttgatttatgcatatctggccctaaattatcagaaattgacagaatggcaggtttgaaggagctgaagccccagtctgtctcctgcaagatcttgcttcatcagacatcccctttctctggtatcttctgtttcttctagggtatactcccctaaaaaagtcaagtgctggaccagctttccccttatactactgtcccatctttcacttcattgccaaacttctggaaagaatattctagcctatcctcgtctccagtgcattcattcctccaacccattccagtatggagctcattactggccaaatctagtggctcatttccatckcattctgtttgatctcttccccagcattcaacaattttgaccatcgtcttcttgaaagtcttggtttctgtattcctgcaccatcttgattgttcctttccagtctccactacctctgtcttttccttaaatgtaaatatgtcttcactctcatccctcttctcttctcatcttattaactttgccttgatggtttcgtttagtttaaagtcgtcactgctatgtagatgacttctaaatctaaccctgatattgtccttgagtgagtccaatgagtctaaccctcaaattccttcctctgggagtctgagaatcatgagctcatctggcgcagtggctcacgcctgtaatcccagcactttgggaggccgaggaggatggatcacttgaggtcaggagttcgagaccatcctggccaacatggtgaaaccctgtcctactaaaaatataaaaatattagctgggtgtagwgctgggcacctgtaatcccagctactcaggagtctgaggcaggacaatcgcttgaacccgggaggcagaggttgcagtgagctgagatcgtgccattgtactccagcctgggtgacaaaagcaaagctccatctcaaaaaaaaaaaaaaaaaaaaagtagaatcacaaacttcttgttgccctgacctctttgcagttcatgaaacctacctttcatcctatatgtcctgcaagtttgaggatccccagttgtttaggtttgataacttgaagtcagcttttcagttccccccctgctattcctcccataggcacatcaattctgaatcctgtaagttctacttagtagcaacacccagctatttcctctcttttctacttatgcttcctaccttaatccatgcttccaaactggcttcctttctttcagtttcttccccttccagctaatcctacacaatgctgccagttgttgtttgttttgtttttaaatatgatcatgttactgtatcatcctctaccccccaaaaaacaaacccccagttacttttcatagcttgtgccctacactgcagctgcacagggctgccctatgctcttctagcacacacagtactttcttggttcagattttgctgtcccctttacctgcagtcccctcgtctcttgcttacccatcttccacacacttagccttcaacatcttaatctgtcctgtgtccttttccaggccatatgtgtgtgcccccagtgagagttcatcttaccgctcaattgttagtctttgcaagttcctctatcagagcacttatctcagtgtgccttatggaataattttgtcataactacctcctacctccccctaccactgcctgataaattatgagcttatcaaggcagggatcagcctttatttctctctctactgtcagcacagtgacatctgcatgggagttttgtaatgatggctttcttcttgaactcgggttagtagaaaggaaggaaaaatcactatatggaaacaaatgagatggatgtttctgagtattacaaatctaacaccaaaacctagaaatctctgttgctgttattggagtcatccacagagggcttgatttctcaagtctgtggtacttggccmtmtttttcmtayctgtgctgagaatccctgcttcttgttttaggaagtcaataaagtaagaaactgccaaaaaaaaaaaaaaaaaagtcaactgaattgctcatatgaagttttggaaggtgacattatcttaggttttaatcactgaaagtcatccttaaaaaaagtttgccagtcaccaatacaatgcaagatacagattgaaacagatcagcccttgaccctgcttttggaatagcagtccctgatattcaagtccacatgtgcaactgtttcatcagtcaagttcatttcatgtcttgtgttgggtggtgtcaggatgcagtgggggcagtcaaggatttagtagtgtgtaggatgagtgatacctagtcccattgagggatgtgacagtcaaacagtagtgatgtgacaaatatgtttagccccaacataagatagtatacattcatttgtgcaagagaaacgcaaaggaaatccacgggggactcacaggaagaagagaccacatctaaccaaaattggaaaggcctacatggaattgatagttgttagtatagggccttgaagaatggatttaatttccagygaaggacttctgaggtctggggcttgagtgatgagggtggggcactgtccacagagtagggaagtcagaaaaagattttatttgcagaaacaggtggaagaaaggggaagggggaggaacaatgagttctgttttggacacatagcatttcatgtattttgacagaattgacagcaagccactgaaggcctgcccctcagtaaagagtctagagatatagatttggaatagtggttcttaagtcatttgaagttatgggctcctttgagaatacgatgtaaattatagtttcttttcccytcaaacatgcagtcatgtacaaaaccttacctaaaattttagaggacttctggcccctctgaagcccctttgtagggccctggtaaagtaatcctggtatgtaatagagaagtcctgaaccagaatcttgggagaggccatcttttagggagtgaagataggaaaggagccagaaaacggaatggttacagaggcgagggaagagcctggaaaggattaacaggatgtcatgggtgtcagtgctgggagagctggggagatggatcacaagctccctagggacctgaccctaactgacctgcttaaagtcgggacctccttttattatctttgcaactctagtgcctagtccagtgcctggcatacgtttttgttttttggggttttttttctttttgagcctttataaatctcagaaaatgatctcggggtgacggggacaaacaccagtttgcaggtgtttaaaggaagcatagttggtttaaaaaagagtggcaggcatgttgagggaagaaagtttttaccttagaatttgaaaaaggaaaatgaatatatttgtggaaagaaatcttgcctcttttcaaggcaagagagagaagggatcttttcttgagcaggatcctgaagaaggcagagggggatgggatccagcccagtttgtggggcagtttgggaaaggagaagggaccattatttctgtgagacaggaggggaagaaaagtttccaaactgtcacagtggggaatgtgggagtgtgccaaaaagggctttcctaggaggtaacataagcctgattgccttgaacaatacaaagggcccctgcttgaaaaagatcactttgttaatattattggaactgttcagccagctgcagattatcttagtgatttttattggcatttgaagtcagaagtgaacttgctgttgcatctatgaaatggtgtctggaggccaagcaagctgggtcctgactccgrccaggtcatgaatacaccatgagtgggctttttcatttcagaccacccctttggctctctctggcctcctgtcccattagtattttcaccactcagtgttttcaagtcacgacttaacactttgaattgaacttgagctgttcagcaacagagttcaccccaaaccattaacttcattgtttctgtgttatgtcaatctggtaagatgcgcactttttttagtaacatttctattttggccaaaaatagaaatttattcatttattttctttttaaaaatctatttgctttgcttttcaaacactagaaattgtactgaattctcataaattgcatgaagctcaatactagttctaggtaaatgatatattttaataaatgtcagtgtttctgatagtatggcgatttttttaaggcagaaattaaaatcatgtataactgaacagagcctgatagtgctacagaaagataaagagtttgattgttggggtgataagttcaatggcaaagttgttcttttgttgattttctttattgtttgctcattttttactcagatgggataatcagagataatacacatattagatgagagttttttaaactgtcaatcctaacctattaatgagtcataaaatcaattcactaggttgcagccagcattttaaaatagaatagaatagaataagagcataacataatatggataagtgtggctacgtgaaacatttctctccggtgtatgtgtgtattgggtcatggtgttgaagtgcattgcttaccgttaatcgtggtccaaaaagtttgaaaaacaccattttaggtaatggtagaatatgtagaataaactgcactttaagttattgtaggcgtgaatatagtcacttaaatctgcctttatagcagtaggcgcacatggattttcttgaattttaagtgaaggtttagagtttatgaataaacttgtgggatatagactcacacaaaggaaggctagggctagaagaaatgaagcctgagacctgggtgccaggctcatagcagccactgatggggagaccctgtgaggggacacgtttgcagagcctttctggtgtgtggtaacaagcatgtgccattggagtccagtggtctatgtctgaatccagctcagtcacttacctgcttggtgaccttggaagtcacataatgtttatgtgcttctgtgttctcatctgtaatggagataataacagtctctaccccgttggggttttgtgaggattaaatgtaaagtgcttacgacgctgcctggcacgcagtaagtacccartaaatgtcagttctgttcttagtgtgccgttttcccagcaggtgtagagaataaggatgactacccagcacacttttgcccaagactattaataaagtaatcgtgataacatgtggggcactttaagctctttcaaagaaagatgctatatatagattagtattcttattaacaaaccattggttgtaccttgagaaaagactctttgaaagtcagagcataatatccagaaagcatgtgacctagaagggtgagatacggggggcagtgatatgtatgaaaagaattctttagaaatggttttccatgtytttctttccatcttttgaccctgctcrggcttactgcttttagggaaacatggctcattcaggtttttgtttttgcacttgccgctttcctttcacattctgcatgaagctctttcgcatcaaaatatttctgttattctgtgaactgattagcagtcatatagttgcgaaatttttgttttcgtgtgtgtggtgggagatatttgaccttcttatgtcagtcagaaaagacacaggtgaggtaacttgctcttggtaactctaatttcaggagagaagcagctgggttgcacagcctttgctgtggagaccagcagccttctgaggactgctggtgtagtacattagattgcatgcaaaggatggaagcaaggtcttccagacagcagcacctttgtgagcagggctcatcagcatttgcaggtgtttgttacagccgcctttggttttcatagtctttgctgcttatttctttttgcctagctttggtgaaccacatcaagccctgccgtgtggcttaaacactaccatatctaccccatgtcctctcttgctctactccagttgtgcttacttgtaaaaagattttcataaaagttagtagagtgcgttatggaggtatatatcttttatgatcatttgaatgacaggtataaatgatcctatsaatggagaattaacataggatttttttgttattgttgtttttgttttttgagacggagtcttgctctgtcacccaggctggagtgcagtggcatgatctcggctcactgcaaccttcgcctccccagttgaagcgcttctcctgcctcagcctcctgagtagctgggactacaggtgctcaccaccacgcccgactaatttttgtatttttagtagagacggggtttcaccatgttaagatggtctcaatctcttgaccttgtgatccgcccgcctcagcctcccaaagtgctgggattacaggtgtgagccactgcgtccagccaacataggatgttttattttgtgcctcagaaatgtggaaatttttataaattgctttgcaattttaaacgaggcttaaatttagtggacccttactttctgggctgattatggaattaatagataaaaagaaacaactcattttcagagggacactgaaatgaagtacacacacacatgcttttagcctacatgtggcctaatgactaaaagttatgtcttagttatctgtttcctttttgggcaggactgttttttcttgaatcaacagtaaacttggcaaattgacacactagttatgcttttaagtctccttccttcctgcctcctctaagacttggtcctctattctcgttgatctctctgtctccaccaccttctccctctcagccttgaaatgtgcttggttcttctccctattgcctgtcctctggaactgacatttcacctggtctcctgtagcattgttgtctatggtcagaagcgtagaattccccgctcgcatccattcactccataactcattgcaatcagtcgtctagcccgctcactggagtggaatgattcttctgaaaatgaccgaagaccctacaagttagaaaacttggtagtctgttagaccatatgcctttcaactgcaccatcgtttgactgtcaactatcccaccccttccttgcaaagtggtgcttttaaaatattgagtagatacaagaggatatttataaaatatgtataaaatctaaagaatgctgattgatggaactttcctttgtctctcctgagatgtaagctgggtaatttcttcagttttatcttctacttcggctgtgcctgatctgagtttttgtttgctaaaatttccattgttatgtttttttaattataaaagttctatttgattgtttttcagatctgtttggccattatttataatctcttcttctgtgctcagatttctcatcctctttttgacttccgaaagcacattaaatgtaatttataatatgcatctgatgattacaatacccgaagtctttgtggacttttctaccacaggtgtgtgtgtttgctggctcatggcactttgtttctgatgtgggtgtgtcttgtgattattgcctgcaaattcctcttccttggaagtttatctgtgggaatactctgagcatatgactgaaggcaattttaccaagagaggatttgtgtttctttctgccaggcatcttgaagcatgactggtttgggacgcttatgaattaaattctcaggttggatgtttttgggaccatccaagttttgtgagtttcgtccacatactacttaagggctgacttgtgactacaaatttctagtgggggatggtggcagggatttgtttcctcccttgcttagcaccaataatctagacaggaaggttctcttgaagtccccaggtggtcctttcccatgcatccttcccctgagtgtagcacttgggaggtttcctcattttggtttggccaggtcttcaggccctatctcctgtgccccaagaggccatgaaaaccagttctgraagtggcctgaaagtgaaagccagtgtgttcctcttgctgtctgcattcctgtttgcagttagtttttggcttctgagtaaaaaagtctctgttatatccagcatttttaggtgttttcagcagaagtcccattatggtataaagaccatcacatttgcagacacctctccctcttttttttgaaacctaactttccccatagcttctgagatctaagtcctctgcctctcacttcttttctggctcctctgcatccttctaccatctagacatgggttttctacaaaagtctgtccttgctctgaattatgccctgggcaaactcatgtccacgaacagtgcctttctaagcatggcttccaaatataaagcatggctttatatttccctgtagctgttatagaacttcaagcaacaccaaaagatctgtttaaaatgactctcatatgccccagaaacccactcctctgtgttcccagttactcttaatgatatcattgtcctcttgttcattcaaatttgaacattcgaaatcaaggccatcagaggttttcatttcttccttttcttgttttctttttttttttttgagacagggtcttgctctgtcacccagggtggagtgcagtggtgtgatcacagctcaccgcagcccgcaggtgcatgactctacacctggctaatttatttttcttttcttttagatggtgtctcactgtgttgcccaggctgacctcaaactcttgacttcaagaaatcctactgcctctgccccctaaagtgctgggattacaggcatgagccaccatacctggcccctgtttcgtagcatgtactaaatccaggggattctgcctccccagcctgacttaattcatatcttcatctcctctcttctaaactgttggaacattgttaggaggtctttctacctccattctgtctcctatcccttgcccgcaaacttcaaccagttcctccctctctgtcagtgtgaaggcagacctctgtctctttcacagtgtggcccacctctctccgttgtttgttatccgtcttcactcagtggagttgagtgtagactgagatgttcgccagtggccatatattctctgagtttggctgccatttgtgcctttttgttgtcgtcttgtccagagttgtcttatccttccagggtagttcagataccaacaacgtccctccaagccccatctgtcaagaagttatctgggcattctctgggcctcatagtactttctctctcccacctgtggcacttgctgctatcctctctatatgccctcctcatctctctcctttggatgacttccaactccttaaaaacagaggctgtgtcttccttgcctttttctccacttcataccttgttcatagtagagcctcagtaaatgtttatcgagtgaatatactaatgtaaacagagcgaattaatcggaatcagtagcaaccaagacatcaatgagaatattctgctttttagaaatagcatttattcaataaatatttactttttaatttaagttgtaaataggtaatatatgttcatgattgacaattcaggaactgtaaaagggtatacaggaaaaaatctccctcccggcacacttcagctacctcattgccctcctcatagacaacccaggtttcagtttattgtgtctccacccagtgatagtttaggcctatacacttarctgattcacatgccttcccccttaaccctaatggtagagagctatatacactgtcatgtacctatttccatccaccaatagacattgcccagtgaatgtgcttctccaccctatgatcttcattccatgtactaccttaattcctcattgccatatatggtaacgtaacacaggtttgagggattaggacatggacatctttgggaagacattcttcttcttatttttttaaacagagtcttgctctgttgcccaggctggagtgcagtggcacaatctcagctcactgcaacctccgcctcccgggttcaagcgattttcgtgcctcagcctcccaagtagctgagattatagcgtgggccaccacacccggctaatttttatatttttagtagagatggggtttcgccatgttggccaggctgatcttgaacccctgacctcagaggtgatctgccctcctcagcctcccaacatgctgggattacaggcatgaggcccagccctggctgggaggtctttattctgcttaccatagcaacccagtatgttttctgatcttttaatctttttcaatctaataggtgaaaatgtagcttccagttttattttgcatttatcttgtatgagtaaaattgaatatctttaggtttgagctatttgtatttgcatttctccattctctgtatcttctacctattttttgtttggatgtttggtctttttcttgttagttgtacgtactttttgtgtaatagctatagtgatgtttaatatgagtgactaatatttttcctgtatgttttttgactttatgatggattttgctatggagacttgttttctatttatttggtagcatttgagagtctgtgttgaggggctctaaaaccacccccacgtgtggtgattcgataacaggactcactggactcatattgtactcacaggtatggcttatkacagcacaaggatacaaaacaaaaccagcaaagagaaaaggcacataggttgaaattcgggggaaaccaggcacaggcttccagagttcttgtccagtggaatcaaacaggatgcacttaattcctccagcaatgagttgtgcagcacatatgagatgttgcccacctgggaagttcattggagactttgtgtccacagtgtttattggggctggccatgtaagcacccactgcctagcacaagcaaaattccaggcttccagaagaaaagcaggagttcagtgtaaaccacattgtttatacaaacagtttgggcacagtgaaccaatcttaccagtgagggaatggtgagaactctgctgaaatccagattaccaagtgtctggcaagggccaaccatgtatgcaggcctttctaaggagggcagcctcaggcctgccatgttaattcttctgcacacttttcttttatagcttctgagctttctatcccaattaggaagatcttccctactcagacttmtaaggaattatctcagccaggcgtggtgagtcacgccttgcaatcccagcactttgggaagtcgaggcaggcagatcacctgaggtcagggattcgagaccagcctggccaacatggtgaaaccctgtctctactaaaaatacaaaaattagctgggtgtggtggcacatgcctataattccagctactcacgaggctgaggcacgagaattgcttgaacctgggaggcagaatttgtagtgagccgagattgctccactgcactccagccggggcgacagaatgagtgagactccatctccaaaaaaaaaaaaaaaaaaaaaaaaacaaataaaataaattatctcatattcctctagtaatttggtttcttccttaagatttaagtatttcatctatttggaatttatttggagttaaagtataagatatgaatccaactctttcttcccctcttgttgcaatatcatttgttgactagtttgctgatttgaagtactgtccttatctcacactaaattcctctgcatgtttgattttatttctaagaggttctcgttgcattaattattctattcatgcaccaggtgtgctcttttaactattgaagctgtataagatgttgcactgtatggtagaacgagcctccccttgttcctcttctttttcttttcctttctattgttgcttaagcaattacagaatgctacattatggctgtgctcagggatctagagctgatacccacttcctgttcccaaggagtgctgttttcctgggtaatgcaaacaaacagatgcatatgatacagtggtgcacaggatgtcacaggagcacaaaggagggcttcctagaggattcagattctgcaagatgagtaggagcatttgtcaggcagaaattgacatgtcatactgaaggaacagtctgtgggcatgcaaagaggccgcacagatgcaggctgaactcacatgcagtttggtgtccgggagcacagcgtgcatgtgggggtaccaacaggagatagtgctgggggcagaggaggctgggtcaaagattgcagagcctaacattccccactcagaatgtctgctttttatctgaaggtgaagggagccatttaatggttttaagcaggaacgtggcatgattaaatttccatttcaaaaagattgctgggctgcagtgtgtgcagagtaggtggaggggacgggagtggaggagagaggaagaccatttctggggatttttgctagtcaccccagtccttgatgatgagggcttgaagtggggcaatggacagggactccagatgatgcttttgagaaagattcagatggtaaaatcagtagaatttggtggttgactgaatgtagttatgagggaggatgggatgatagggaagaatccaccctggataaccagaccgatggtggggccagtggttgagatggggaacataggaggggagtgaggaagaggtggcaagttccattttggttatgttgagttgagagtgtctgtgagacagccaggcagagatacctaggagacagatgaccacatagatccagagctctggcctggggagagctttatttggtactcctggatcacatccacatcacatcactagcattttcatagatgtggccaaaattgccaggagagagaactacagtgagaagagggacaatgtatgaaccctcagaaatctcagccttaaatgattatgatagtggacaagttgtaaagaatattcttttttccaaaatagtttcaaatgacatttcaaatgtacatttgtggtcctttcgtgaacaaataaataggtacgtttatatatgaagacaatgatgacacaggaatatcaagccatttccccsagaggtactgatttagtcagtagtagaaataggattaggagaactgtttatgcaaacagaagtataattggtaatctatgtgctagctgcttttgacctgttatcttttgtcaggtttttggaataactgcgtcaaaactgatataaatgaacttactgtgtcaagtcgtgtgaaatatacagaaagcattatctagcattagggcattagaattataaactttaccacatatcagtacgtcctatggttctttaaaattttaggctttcccctccaattttaatgaaagcatttttttcttacatgatcaagtcttgtttctaaagtttaaaagatgaaaatgaggtaattttacattactgtacccttaaatggtagatggaagctttttaaaaagatgagtgtctttaatttcagaaatcaaattcaaaaaaaaaaaagctagcttcaattcctgttcaaacgttgcaaaatttaatccagaaagaagcagttgggccagatgccgtggctcacgcctgtaagccaagcactttgaaaggccaaggtgggtagattgcctgagctcaggagttcaaggccagcctgggcaacatggtgaaaccctgtgtctactaaaatacaaaaaaaaattagctgggcgtggtgatgtgtgcctgtagtcccagctactctggaggctgaggcacgagaattgcttgaacccaggaggcggaggttgcagtgagccaagatggcaccactgcactccagcgtgggcgatagagccaggactctgtctcaaaaacaaaaagaagcagttagtaagtggttccctgaagttttaagtttaggtatttggagacataggtcattaagagtcatcttcctgaaaaatcacattcatcagttgtgccattgggtgctgttaacatcatttgaaaacacttttaaatgttcatagtttatcaatttattcccctgattatgagctggagagagcctatgacagtgacagacagctgtccgtcctcaaaggaaactcaagaattaacatttatagattctgtttaaataaacaaaaaatccaatctagatgttttaaggaaatcagtgcatctttatataggtgccatttaaaaataatggctaattaagtgaaagctaaaatctgttgtcatttcagagactttacccccacaagttacaatgataaatgtagctaaattaaaatgacaagttatattccctatgtcagagctgtttttatccctggtgtgaaatcagagagtttcatctcaagtttgtcctttaacatttttcaaatgttacattgtgctatttttaatccggaaacaatgcacatgattgctttaaaaaaaaaaagtctccatgtacagtatctcttgactagtacggatctagtgaattgtgaattgatgaaatgcccaaatactaatatagagcaaaattaaggaagacatgacttgctcacttgaggaaggtgagggtggccatttgagagtatcttctgtcagtttcctgattttgatattgtgctaaaagttatacaagatgttaacacctggagaggctggctgaagatttacttcttgtgaatctataattatttcaaaataatctaaaacaaactaaagtagctccccaacagcttgaccacacagaatccttaggctacattcctgagagttctggtacatcccacatggcccttctaggaccaaggaggtagaaagtcaccccctagagattctgattcagtaggggtgaggcagggcacagggcatggtttagcctctggaaaaagcagcccacttcacccccaattctgaggcagagccgtagataaggaccacaccctagaagaaagccacgtaggacttgctgaagcatctactgaaaggtgatgctcagcaaaacatcttctctgtcctaagactttgctcaattgggactgaatcgttcttgaattttccatagtcgatgaaatcagtacttggacgtgttcattgagtaagctttatcattacccatttagcaaacaagacgcgcttgatggttatagtggaaaatacttgagagccagctctctccatgtgatttagagttcccaaattaagggtcaaaattgacccaaggttatatttaagaataatagttgaaagtgtcaacacattaataaagtgttaaagaatacattgtctggaagagaaagtaaatgacagctaaaaacctcaagacgtataacctattcacttcaggttttaacaattttgaaataggagctttaattaggcttgtaacaagttaccacttgtaggggattttatgctttttgataatgaggtacagatgaatgtgttttgttattgctttatttttgtttttgtaataatccaactttatgttactctgagagcctatattctcttaatctttaagaaaaaaagaaaatatatctgaaaagtagrtcctcgtactttcaagttcagaaaatggtggtattggctctttcagactgctcacttcaattgagccaagtagcttatggaaaacttagtttttaaataaaaacaccacataaacactacctagtaatgctttttgaaaaatgtttttctgtgtttgtaagctaatttatttgaatggtgaaaatattggtttaagcacccagtcttttctaccctaagctccaatttaatattagatgtgttgctatgtgcttcacgaggagaaatatttggctgttgtgcgattcataattcttcctgaaatatctggggtccaagcctggctcttagcatcaagagtaaactgggagttgtttttgtcaccaattctaatagacatgtttcgggttaaaggataccagttagttgactcattctggatattagtcagaatgtgaagtatcatcatagaagtgatctcatcagagagtccatctgatgtgtggttaccatggggacattgtctcagtctcatactaatgacaaaaaaaaattgatgttgcttctgttcaggttcttttataaaacatattaaggaagttaggtagataatttttgtttaggccatatagctttgattttctgataacaattttataaacttagaaattttcatgtaagatacaggaatactggaagcaaaaaaaagaaggtgctttaaccttagggattgaaaaaatagtaatttaggttgaaaatgctgcttgaaagttaatgctgatagcattactacacatgatgattttttctggaaggaaagctttatctgggccttcaatttaggaatttttctctttggtttttaaaagctgccatattcacttgagcttcatgggaaagatgcaaataactaaaacaaatgaacaaaaaccatgttgaggtcaggaacttatttcaagaaagcaagttctaggttttcttttaaagtgacagtagagccttaggcctcaaaccatctacaaccatgttaacagtacatcactcaaatcattcaacattcctgaatgtttacctgtgccaagtactgrccagcgcagtatcagatgttcacagtaatgatatattgccaagagaatgcttaggcatgtcccatatattctgtttatggataaaggagtgcaccaaacattttagtgctattttcgcccaaagtccctctgtctttaatttaaacttaacagaaatcacttatttttcccagtggtactgaataattatgcattgctgtggattcagtgtcaggttaaagcctcagtgcatcgcttagctaggtcagcatcattaccagtgtgtgcttatcatgccagccatccagaataaacagcacttgggcctagcgctgccagagttgagacctgcagagtgtgctgcatgcctgggaaagtttgagaagacattgtggagagcatgttcttgggcagttttcaccttaaacctcttgccattcacatgcagaaaactgttgctgctgaaagatgcttttccagaaatacactgtgttgtaggggagggaacactggtgttcaaagtgattagtctgatgacagaggaaaatggttggggagggagctacatagaggaaaagtgcccagacgcagcgcctccagagaagatggttgtacaggggctgtgtgggccttcatgtcttcattcggtcagcgagcctgtgttctgcctccctctgaccaggcgccattgtagttactggggataaaggatgggaatgaagcaagtgtgtactttcatggagcccatgtcctaggggaggggatagtacatatgtacagtgaacaagtacatatgtaatatgtcaaatggtcataagtgatagggaaaatcagatgggaatagggagtgctgttgtgagggtaacatgtttttttgtagggtgtcggagaaggtcttactgattaagattattggatcagagatgtgagagaagacaagaagccatgaggtaaacgaattccaggcagatggaatagtagccgcaaaggccctgagagtggcatgtgcttggtgcctttagggagtggcacaggaggcaggtgtgacttacgtggagcgagtgagtctgagagcagagatgtggcgggggagatggccagatggcagacagctgcataagccattggaaggacttccacctttactcctcgcaaagtggaaagctacgggaggatttggggcaaggaaaggacttgatctgacctatgacactgtcactctgacttgagaagtacaaagatgaaagcaggggagcagttaggtttttataatcaaccaagtaagagatgatggtggcttggacctgggtggtagccacgtggtgacaaagatgaatccaaggttttcagctcaatcagctggaagtcatgtactgaaatggggagactgtgggaagagcaggactgggtagggggagccaagagtgtttggctttggttgtgttaacttgagagttcttcagatgcctcttaggcagtctggtggggtggtagagtggacacttggatagccaagtctggaattcagaggggatgctggagaatgataggtccttactagtcactagagtatggatggtatttgaagctatcaaatgtatcaacagcacgttgagggtgagtatatatagagaagaggtgagaggtctgagtcctgccatttcacagaaaccagggcattgattcagaattcacagagaacagttagctcagagttttcttaatatcctatctttttaaaaaataaacatgtcattgttcccttttgagacagttgcaccgtttaacaataattcctgaattttatttttcttcctttccttctttctttttagtggcttgtacctgatcaattgctaatactgtttaaaattgataggcactttttggtctggtaatctgatttttttgtggaacatcattaaaagaacaattgagagatttatagccatagaaaattgaggcttctattactcaagatagaagttagcgtaagtctgatctgagttttccactgtttttttttgttgttgttgttataagccttggtgtgggttgtaatttcatggtcggcaaatctggtgaaatttattttgcgagaaatcaaaagatgtactataatagtagactgttccttcacgctgaactttatttattttttgccttttctagccattatttgcatttttaaatgaagaaaagtttaacgtggatggatggacagtttacaatccagtggaagaatacaggaggcaggtaagatgttagatgctattgtctggtatgtgatgaacctgaaacatgcattatgacagtatgtcatcarccatgctttctgaaaatcagcgacatccttgctaaatatcttttcaatggtggtgatattatccacattttgtacaatatatctcattctatctattactgtataacttataagctcattccattgccatatgcaagctgcatcgaagactgggtcactaaatcctatttccttccctatatgaagagcatcaattctgtgttgtttatgaaatgaattaaatacttaggatttagaaaagtcaaacattttagaagttacactttaggacttgatattgctatgtatatgcatgtttgggagcttaactattacctgcagttagatttaaattatattcatttcagtttgcagattcaaatgaattagaactgttttcctgtagtgatgtctttttcaaggaagctttgataagtgtacattataattgtctttactgttctcttatatgaatgtcacctacatgcatgtttatttgctataataaaggcaagaggcttggtctcatattgctgttcaggaacaaaagtctcttgcagtatttttgttaagggaattctgtgcataatatgtaacaagagccacagtttgacctctggtataaccaaatctgtaggcagctaggagttgtgtgatgggattattcacaattcttgttctacaaagctcttaagataattgaaaagttttgttgaatgagatttgagaatcagatcaaacccatttgctttatatgaaaaggtagtgaatataaagtaaaatcgtagaaccctagacttgagaagaaccatctagtcaccaccttcaccatgaaaaacctggattggtttccttttttagtcttaatcaacggtttgcatattcatgaacagatttgacgctctggaatttgggtgcaggagtttagctttagaacatatgtgacatagtatatcctgttgcttccataagtcacgtttagactgttgagttttctaaggctttgcactactcccattttaatggcctcagttctggactagctactgaggcggaagaaggaccatgaaaacattttgcatgttttggagacctctgtaaatgatgtattaaaatatttttaccttctttttgaagtattactgataacattaagacttttttttagttcaaagcttctagcttgaaacaaaacagttcctgtttttaagattgcatgcatatatgaactgttgaaggtattttgttctagactgccattatattcaatctttttttcttataactttctgatgggacttataactgtctaattggactcagcatcagactcaacatctgtttggtccgtggtctctagggccagacctaaagaaaaggtacaatgtctgtccccaaagcaaacacccacatagctcacttttgtgtgtgtatctgtgcatttgtgagaatggggagagaatattccaccacctctggatcttttccatactaaatacaattttgtgggggagatgataggatgggaggtgtcttctgtgtctccctgtcacattagcagtctgcttaaaatgcaaatgactgtatttctcacacaaactatagggcaatcatcgattccgaayaacttgattgaaaaaaaactcatcggaggtggcgaaatgagcctccccagagggatcttcctttacttcccctcatgattttcttcatgagctcagcctctttccactttggagcagactgaagcattcactctattttgagcagggagaggaagttgcctgatctcttttctaccctcagttagagccagattaagatgaagcagggtatttttttaggggatgggaggggtgcatgggcgggggatgaacttgggtttatctgtgtggtacaggtagtaaagaatatgtggacacaaaataaaggaagacgaattcctttgaattcaagagaatctgtatttacaaagtatagtttagaactgtaaaaaccaccagtgttttgtcttgtgttcttacgttgtctggattattgatttggcacccttattataaataggtagaccgtcatcaccctgtggtcaaagaggcatgtgcacatattgctagaaggaagaaaagaggcccaaggccaaatccagagatgaggtcaagcaatactgacttgaatttctttttttcctcacagggcttgyccaatcaccattggrgaataacttttattartaagtgctatgagctctgtgacaytwamyctgctctttyggtggttcygtatcgtgcctcagatgatgacctccggagagttgcaacttttaggtccygaaatygaaytccagtgagtactgcaattaacgtttctcttgaagagcaccttttagtccataagaatggtagtcatataacttagagaaacggtccttttggaattctatcccaaaaaatacttactaagtgctttgtgagtacaaagtaccataccagactggagaagaagtgtgccgtcacctgccttctaggagcttgcaactaaggatcaagaatgaacgcaagtaaagagctctctacgagagaggggmtgcaagtaatgggaaccaagtgctgtgtggaaggaagcaaggaaagacaggctctttgtggcttttgtctttgtggcacagtacatgatactatatgataggctcttgataaatgtcagataaatcatgctggaaagaacacactgtcttgttataaaatgtgtcagcacagactttgacatacactcaccacgagctcacccccatcacctttgcaggctgccccaataccattgtctaactggagtcaagtatagattattccagacactatccatacggtatcactgcacctagttcacaaagctctcttttggtccttaaatattaatggacatgtgatactatctaacattgacaaaaattgactaaaaatttaggtattctcccctgctaattttcagggtctgtcataagtaccttggggttttttttttcccctaataagtaaatgtttaaaaacaaaggttgaagaaattaagacttaatgtcaccttgcctttttcaagtctagacattttttttccttaaaaggatatttgtgcaaaacttttgtattgtcagcctaatatgaattgtaattttttttaattcacttgttatacacttctagccataaaaccgcagaagtgatgctgtgttctcagtgcaccaccttaggagacatgctgttgatttgtcccgttattagtgatgttaactgtgattattctgctaaggcagtgtctgtcatgtttttccactatagcactactattttacccattaaaattaataaatgctttatgtaatgatttttttaattcacttgcttctccagttagtagtgtctgttcatatcttcgcgatataaattgtacttgaaagtatgttctttagctcatgttgttagaacatgatgctaatgaagctagggttacaagttcagtcttcctgtgctctgtttggacatgctcttctgtaccatagccacagactacacccctaccctggctggctgtctgtcttgctaatgcatgccttgctcacaaggacaactgggctagggtagcctggctcagttttgttcatgtattcattcagttcatatttattgagcatctaccgtgtcatttgtgtatgtgggtgaattctatgggatttgaaacagagaaaattgaacaactgtgccctttctaccatgcttggttgccatcttgatccagtagtccccattattctgaatgaatgagtgtctactgtagagcagatagaatttcttaactttttatttagtcatgttattgatccttcttactttatcatggccaccaatttgtatttattttttctaaaatggcttttatagggaagactaagttccccatcacctctacatatttatagatttactattaggtactattaagcgtggtaatatgttctttgcagtatgctttctaaccacccggctgttggctaagtctcagagctttgcttccacccagaaaacatatgtgcctttaatgtgaaatcattaatatctgatagttggttctttttataaaacctcatgtaaaaatacaaaaggaagtgacatgaaagagatcttattttgcatgtaaataagatataaactataataaaatattgctgggtagagaaataatcaatgtgcattaaatgtttccattaatggatatgtattctcttattctcaaacagatttctcttaattttatgagtctttaatgtatgagtaatgcacgttcattttaagcattataaaaaatactgataagcaaaaaggagtctgccacctagtgagaaccagtgttaacactgttggtatatatcctttcagacttccttctaagcatatatctacacacacacacacatatgtatatatatttgaaaaaagtgaaattattctataatttgtgtctcagtctatagaaattattctataatttgtgtctttatctagcaatatcttgtaaacaacttcccatgttgctaaatatgatccgctcatatgccagtgtgtagatgtaccatgatttaatcagttttccattgtgagacattcagcttctgcttaatcttttgctattgtaagtaatgctgtaataaacatctttcagtggttagatatttgtgtacttaattatctatggcttctagatatgaattttaataagaataatacagtgccatatactgtaaaagcactcatggtagttgacactgtgaaatgaacattatttgtacctgtttagctctgtaataagcatccttttcaaaaagtagtaagaatcccccctcctgcaaagaaattaagaggagaaacaactcagaggagtagcatttcctaacatggcaccacaaagagaataggggtcgggaggccattgcctatggcccgactgaaatttacaacttgatgagggtctttctcaataatraataatttttatttttaataatttctcaaattattaaaataataaaaaatattaaaaaatattttaataatttctcaaataataaatcttttaaatgtgtagcaaattgctcctttaaagtggtctcatgtctcttgtctctcttgataccagggccatagagggaaaggaaggcagatctcatatgtgctgtgcattatagattggaaggtggaggtttaggtcccactggtaccttctccaaggctcccagttctgagcctttggactcttattaggcaggggctacaatggtgtttttaattgatctctagcatggtgcaaggaccatatttgttctgagaatgaataaatattactgtataatcttttctcaataacctgttgtcattataaacactcatttttataaacatcaatgtttgtcatttgccatcatggggtaggtaacttcagagacatcagggaatttggtgttatgttgagtgagcccacatgattaagcttctttcgttctttgtatctgcattttgtagtttttgctaactgactttcctggctgctgggcctgcctctataagctaacacgagccagtgtttattgcagactttctgggcattcttcttcaggccaccgagcaaccctatgagattatattattctccccattttatggaagaggaaagggaagccagagaagctgcgagtgaaatgcctgaggttagaaccacggcagagatggcactagaccccaaagtccacattgtcgcccactgtgctgcagttctccagcttcccatttttaatagctttattgagatctacttcacataccaaacaatttcccatctcaagtgtacaattctgtcgtttttggtatattacattattagctaccttttacgtgtattacttttcacatgctatgagcttggcaaccagggagcaaatgtgctagacttgtgtataaagttagagaagataggttctgaatcagggcttgatgaggtctcctaggcattggatgtccacactgcactgtggagacgagcagatctatgctctttgggctgtcctgagatcagttttgctctgctcaggttttcttccttcctgtgttagattctagaattgagactgttgggaaaatgatctgtagacagagttggtattatgagaaacatattgtaccagagacaatttcctttacctctcactttttgccaaagctgcttctatatgataacaaatccagtgcaagctacataattaaaataggatcaagctttcaatttcctttaagtgatataactatttttaggtaagcaattaatttatattggatgtggtgctaattaagaaaagactggtaattgtacttgtttctgagttatattattaaatgcatgtctctgggcacacacacgcagtgagattgcaagtgaacaagtattctattttagcacaatcagattcacttcttgataaccgtcagtgctttactgttttacagttttaattgtttgcttggagatttgctttcttgatagcttaaactttctgacttaaccatagrtgcygycatrkattcrtccagaaaataagacggtcattgtgykttgcagtcagcctcttgtcggtatgagtgggaaaygaaataaagatgatgagaaatatctcgatgttakcaggkagactaataaacaaatttctaaactcaccatttatgatgcaagacccagcgtaaatgcagtggccaacaaggtgagtggacttaatgatgtgctggacacttagcttacatatggagtgcagtgttttctgtgaatgtttttgccatgatatagaaacacgtgggtttaaattaatagttaagaaaaccagttctcttagacagaaagtagttttaatcacaaaacttaaacaaaattgaatatatcaaamtcaaatgcaaataaactttaggtaaataggcatgtctagactgtaatgaaattgggttttggccaggaccttggcaggaaaaagttagattctctttaaagccctttcagctgtggatgatcactcattgtgtacactattggggcatctgtaagaagctatgggaagctgtaattattaaaatactaaatttgcatgcttactcaaacactccctcccccatacccgtatatactcacatatgtgtattctcatttacataagataattcaagaaatgagtaggtccacgtatgtgagttttccaggcacaaacatatacacaaagttgaccgttttcaaagaagtctgtctcaattgactttttgctgtaagcagaatatgctgaatgcacttaaaattgattagggtcatcatgaacatcagtgactgcatagtgttgccttcagaagctgctgcaaggtgtatggctgtttgcttgctctactaaatggccccagattgatgtgcattttacgttctatttctcctttttgttgtttttcttttccttctcctcccatcattgctgtcactttcaaatgctcacgaggggcctgccccaaattgctcactcccattccagctttcagatttattgtttctcctctgctgtaagcttaaatttcatcatatttaatacattgcttatcctgaggttatttgtctagcatcttcaattattcagaacataagacaagaaccagaaagcaaaacaagttcttgagcagctcagataggtgcagcagcttcctaatagaatctgtgatatctgtctggactaggatgtgtcagactgcatgcatgcagagctcaactcttcattatttgtgcacagatcttctgtcctacacatttaatcctgggccacctccccatccccatgcatgcttttaaaccagctatttgttactacggttgttttttggtccagagatgattttgaaattatatgtgaagcagtcagtaagttaaattgacaagtaaattaggaatcgtaagtgaaacactcaggaaattaaatctaactctaaatatcttcttggattgtccttaattttatatatctgtgtacctattatctttcatatatatttcagggtgaatatatatatatatatatatatatatrgcaatattttcatgtacatatttagcctgaaatagatatgatatagcattacaatgaagtatttacaaagaatattttagaatattaaaatgcatgaaatggatacactaattaaagctcattccagcaacagaattcctgaaggcctttttaacactcaggaaacaagcttctatttctagtcctcttaggagtcgagggaaggaaaatatcagggaaaaagcctaagctttacagatctctgtcattcttttaaaaagctcacttgtttctcccttcctctgctgtgtctctccgctagtcgctaatatccatagcaacaggcccgtagacctttacatcatcgtcctaggtaatctacattgttcttttttgttgaagaaaggaaaaccaaaaagaatacttcaaaagtaaccagagatgtagaatttgaactttcaggaactcagtgtgtgcttgactaattgattgttgccctttctgaccttctgttctccttggacctaattgttcctcccttacggatatttagaaatttacatccccagatgcaacaagcaacggcacatcattttaaattaaacaaaatccaaggattggtaagatctagcagcaagccgcttctatttttgtggcggtacatcgtgatgaattaatgtggaactgtgctaatgtctgtttttaccagaaacattagcgatgagtaataaagtatatttttccttttattttttcacttattttcagttatttatgaagagaactctagtttcaagaatctctttgaaaatcaccataactatttaaaaaccacatgtgtagagaagcaggaagaggagaaagtggcccacttaaataataaattgcttatttattagctaataactttttwaaaacaacactgtgaatgtttactgtctacttaccagtgatactatttagagcacgctctaaagaaatatttctgcctaactatattttcttgcctagagtctttagagaccaagatctctggcttttaacataggtctccaagtttgaaacctaaatggatggtagccttacttctgcaggaaacctttttctgtgactacctccaggaaaaaacaaaaacaaaaaacaaaaaaaaacctaagtttctttggcccttctatccatggctacaagcttatattccttccattgttgttaataaagagaaaataggcatattgtagctatggcacatttgtctggtgacttctcctttcctcttcagccccaggcagatgtttccctgttctgttcctacaggcactctggagttagtataatattgttttctttgcaagtctcagaactgtttaactttttcttaaagggccaaaggccacgtgttctatgccatttcaaaacgtttaagcagartgcagccagattcctaaatgaaaccatagcatctctttttgtcagtgtggaaaatgggcactcttcaccatgctgtgaagatgaaccaaagcctgccctggcaagttaatacttgtagttgctgcagtaggcggtagccatcttgtctcctcttgaaatcttctattctttcagagctcactatgtgcagtgctctctcattggtgtttgcatagcagagaaatagtcatggtttagtagaaaaagttcgagctttgaagccagacttagacttaaattccacttattacctatgtgacttaggggatagttaactagcgtctctgagtttctgttttctcattggcaaaatggggacagtaatacctatcttgcagcactgctgaagagagaaaattatgtaaagcaagagtcacagtacctgggatgtcataggagttcattaaacagtggctggcattagctattataatagagtgtggttcctttaatagtatgagacctaggtaatattatcccctattttacaggagaggatgttgaggctcagaaatgttaagtgccttgtcccagatcacatggcaaggagaagctgaagctgagctatctcagcctgggtctgtctccaaagcctgttgttttcctctaatgcatcacgtcctacgtgagtgctgttacagtgccagaggtgcctgctgctgcctcagtctggctgcctcccgccttccccctgaagagtactattagagatacaaaactaatggagaacgaggacctttcacaacctgcttttgcctttccagatccggaagaagagctattaattatagagcattttgaggatgatttttttccttaggaatacagattccccaggaaattgccagccttctgtctttttttcaactcaaagtatgactaatgtttttgagacttgttgttggcyaggaagtcaagtcacatcaattattcatttaaattggagggtttggggttatttggaggacaaataactagaaatatttgtgtaagtttctgatgaaatagaaaactcaactgattgtttgtatttcatgttgtttcttaggcaacaggaggaggatatgaaagtgatgatgcatatcataacgccgaacttttcttcttagacattcataatattcatgttakgcgggaatctttaaaaaaagtgaaggacattgtttatcctaatgtagaagaatctcattggttgtccagtttggagtctactcattggttagaacatatcaaggcaagtatattttgtgaaaatatttgtgtatataaaaaagaatgtaattgtttagtggaatggacatatttttaaattccttaaaaaaatggacattgagagataaactttgtagtagaggaccacatttaacagttttatgttgctttataatttgcttacctaaattaaagatttcacatcatcactccagaatatatttagagtttgcaaagacatctctttccatctttcagtattaagtcgttcagtctttcatgcaggtttatttaggaatagccaatttattatctaaccattactggatatgacctctttggacctagataagaggtggttagttttgttttttttgttgttttttgtttttttttgttttttgaaactaatctcaaatgacttattttaaagaattggttttgtgttttattatgttcaatcctttatcctgataaaggcagcaataatcctccactttttaaaaagtacttgaagtgatctgagggaactaacacttttagaaaccatttagttctgtacacaaacaaaaagtcagctttaatgtataggtgaattattaagatatattctctagtcaaattttgttttccaacttacccttcatctgcaagtggtggcatgctcttctcagctagcgaggctcaccctcttggtgtcatcctacatttctttagctcctgcactgagctaatcatcaagtaccacaggcccttccttggaaacatgtctgtcactctcatagtcccctcacccccacactggcagcattcaaactaggccattactacccctatctttgcactcttaaaatggttctgttttctcttccttccctctcgtatctattctataagcagctgacagaacattttcctaaaatatcctgctattccaaaacctctgggggctcccaacagcctaacctgacagccacacccctgttcatctggcttctgcaggtttgtagattaacctgcaactacagaaatccttactcttcctaattccatctcacttatgcctgtttctgggcctttgtctaggttgtcctctttctctagaatggattcccccatccttccactttcttcaaggaccagatcaaatcccaccgaatctcaaagggaatgttccttccactgactttgctatacattatgtctctttttacacatacctatcatctcttcaatcatatgtgaacctccttaaagtcttataccattttcccattcacaaggtctaacataaaaaccaaaataaaactttttattttacaatagttttcaatttacagaaaaattgtaaaagtgctatagaaagttcccatatacccaaccgagtttttcttcttattgacgtcttacactgctcataactatggcatgtcacattgtacagtatactagtcacaactaatgagccaatatttatacattattaacttattattaataaagttcatactttatttggatttccttagcttttacctaatgtcctttttctgtttaaggatcccatccaggtatcacattatatttagttgtcacaattaggttgtttttttttttttttttttaacaattcattggtgaggatgacaaattcataaaaaaatgaaaggcaaaataaaaataagatttgattgggaccttggtcaagagaaacaccatgcatttggggtagtgatgggccgtccacctggtggtgtctagcaggcaggctttctgcaaagtagaacccaaaatagagacttaacacagagatgttggtttggcagtcagctattgggcaacaaacgcaagcaaagccctttaatgtagattctgagagaggatgtgtggggaaaagatcagaggactttgagtggagctttgggcctgtttgtattcagggcaggaggtgagaagtggagctcagtgaaggaggcataccagagaaatggacatcaaaggaggatattggarggtaaagaaagggtcttaagaagaaagggtcagtggtacttgaaggaggtttattagcgaggtcctttatgaccttgggggtgtctagtgatgtggtgggtgtgagtgagaaaatagaggtaatgaatatcaactgttcttttaataagagagagagttaaggaagggggaagtgttgaggatcatatgactatgagaagggcttttcaagtcatgggaagcttcagcctgttttgtagacaaagagaaaagatttacttcaggaatttttttaagggaaataatcacacaggtctgaaaatatgaatatactagaatgcttatgatagtggaaaaacagagccagcatggtggctcatgcctgtagtcccagtgctttgggaggtcaaagtgggaggatcgcttgagcccaggagtttgagaccaccctgggcaacgtagtgagaccctgcttcttacaaaaaactcagacaaacaaacaaaaagacaaaaaatagttgtagttgtgcacaactgtagtcccagctactcaggaggcagaggcaggaagattgtttgagcccaggaattttcaggctgcagtgacctattaatatgattgtaccactgcattccagcctgggtgacagaacaaggccccatctctttaaaaaaaaagtggaaaagcattggaaagaacctaaatgtacaagaaaagttatatatatatacatatatatatacatatatatacatatatatacgtgtgtgtgtgtatatatatatacacacacacacacacacacacacatacatacagaatttagaaaggtatccaccaatatgtgaataattattatttctgagtaatagggctatgttttctccatttttttccagggaatatatattttctaaataagaagaaaagcttttttttaaaagagagagcacaggtacaggagttattggcaaggtggctcagctgctactctgagctagatagaaggaagagagactgggtgagagtaggtcttgttcaatggctcagatgtctgaggaagttaggaggtaaggccatctgcaaaagatgaagtatggaagttagcacttaaggaatgtgggaaatgttttaagagacctctctaaggttttatagttttgtctatagcaaaggggatatgaaagaaatgaaagaaactgtcattgttctgtacagaagccaaaggagttaccaggagactggggagtctaggtggacacttgtaatgatatctgactcagggcttctcaggcatcagtcacatcatagcaattcagacagtgaagcagagttgtggatagccttgagttggaccttgaatactggttggaacgaggggaaatccattccccgcctcttccagcttcttgtaggcatatcattccatcctctgcctctgtggtcacattgccttcccctcttctgtctgtatgaaatctccytctgcctctctcttatcaggatttgtgtgatgtaatttagggcccacctggataatccggaataatctgtcttctcaaaatcactaagttgatcacatctgcaaagtccctattaccatgtgaggtagtatacacaggttccagggattaggacgtggacatctttggtgaccattattcagccttctatactatcttatagccctgggtctgctgacaggtggcatggccatcactaacctgtaatctggtgaaatggtgtcaccattcaatgtatgaaagcggggcaagccttttgcaatgagaaaatcaccatccttagcatgcctctcaaatcatcattccagttcactgacagccccagcagggtggaagaaggactctgtagtgtctggagcttgtatttcctctttgtccttttcaatacaatactcttcccctatagtcctgcttcttttaaagtatcatattgttttggccttcttggatggcagctagccctcattgagcctatgctcaatgtgagcactttatggggagcatcttttagtccaagacaagctagtggggacatggctcatttcttcacagtagagagagagaaaccatggttactcaattggcccaaagcacgagatatcaaaagtggaatgaggtttcaggcccaggtcttctgccatagagccagtgctcttaactaccgtgatgtatactgcttgatggctgtcatttctttcatcagtcacaagtccatcagattatttaagtgtttttaaaactctggtatagttttattagataattatagctgtttctgtcagaagtgatcgtgggaattaatacttaattggaacacagctaacatttttgaaaataattggctgagattgagtcctttttatattataagtgagggaagtatctcgagtgagagttgccctctgtaaaaatgcattagaaccccaacttcattaaattggactcaagtgatctagtatattaccattgcttctcaacagccctttcttcagaagtacttcaaatgaaaattgtaaacaggatttcaaggagaatacttaaaatgcttgaagaaataaacggctctagtcattttaggagtaatggattttgtacaactaattgatgtacatccttaggtcccttaacctttccttcttggcactactttatccacttatctttagttacattgtatatgtaaaactaatgaagttacatttctttatttttatttttgtagattcaaggggtaaatgtacaggtatgtcacatagatattgcatagtaaggtttgggyttctagtttacccatcacccgaatagtgagcatggtatccagtaggtaatttttcaaccctmatacatcagatctttcacttggtctgccttttctgtgaattagttaaaataagcgaatttccatttccttgaattgggtaaaatgactataatacatgtctgttgcatggctgttagaatttggaagctccgtggaagaaatcttttaaaaaccaacccaaaattacataatatatacaaattgttgatacgcatgtgaaaagatggaactctcatacattgtttctgggaatgtgaaatggtacaaccacttttgaaaatagtttggcagtttctttaaaaaattaaacatatggccaggcacagtggctcacacgtgtaatcccagcactttgggaggccgaggcgggaggatcacgaggtcaggagatcgagaccatcctggctaacacgatgaaaccccatctctactaaaaaatacaaaaattagctgggcgtggtggcgggtgcctgtagtcccagctactcgggaggctgaggcaggagaatggtgtgaacccaggaggcggagcttgtagtgagctgagatcccgccactgcactccagcctgggcgaaagagcgagactctgtctcaaaaaaaaaaaaaaaaaaattaaacatatattcaccatttgatccaaccgtttcactccaagatattttacccgagagaaataaaaacactgtgtcccttcaaaaaatgtgtatgcaaaagttcatgccagcactattcatagtaaccaaatgctagaaacaaccaaatgtctatcagttgatgaatggataaataacgtggtctatctatatacaatggaaggttatgtgaccatgagaaggaatgaagtactgattcgtgctacaacacaaatgaaccttgaaaacatgatgctaagtgaaagaagccaatcacaaaaggccacctattgcattatcctatttatgtaaaatttctagtaaaggcaaactatagagacaggaagcaaatcagtagttgcctggggctcaaggtgggagaaagattgaccttagatggyacaagtaaactttttgggtgatgcaggtgttctacaactacattatggtgataattgcacaactgtataaatttgctaaatcttattgcactcacactcaggatgggtatattccattgtttataaagtatgtttctgtaaatgcatgaatcatcaaaaaatgacatcatagcaataacttgttatatacataaatttattgatacttctaagtctcaaatttttactagaatactttcactttaagtaccctactgattatgagccagataagagttgatatattgccaatttaaaggtcaaaaggtggatttcactgtatcagacttttacagtctagacgcgacctgttgggtcagtgattttttttttaatctgatcacagttatggattgaatttttgtcctgcaaaaatttatatgttgaagtcctgaccccctgtacctcagagcgtgaccctatttgaaaagaaggtctttgcagacatgtttagttgaaatgaaactgtactggagtagtgtgggctcttactttgttatgactagtgcccttataaaaagaaatttggacacagacacacacacacagtgagactgccatgtgaagattggctgccccaagccaaggaacgaccagaggctagaagagtgacctggaaaagatctttagtggtgagcatggcactgccagcactgtgatctcaaacttctagcctccagaactgtgagacaatatatttttgttgtttaagcctcatagtttctggtactttatgacagccctagcacactatcgcaatcacatccatgaaaataagtttgagatgcagtttggcttttggtttgtttcagtttgttttttaacacctgggcacattcaaatgcagtgtctgcagcaaaagtaactatcatcagagtgaacaggcaacctacagaatgggagaaaatttttgcartctacccatctgacaaagggctatatccagaatctacaaagaactcaaacaaatttacaagaaaaaaacaaccccatcaacatgtgggcgaaggatatgaagagacacttctcaaaagaagacatttacgcagccagcagacacatgaaaaactgctcatcatcactggccatcagagaaatgcaaatcaaaaccacaatgagataccatctcacaccagttagaatggcgatcattaaaaagtcaggaaacaacaggtgctggagaggatgtggagaaataagaacacttttacactgttggtgggactgtaaactagttcaaccattgtggaagacagtgtggcgattcctcagggatctagaactagaaataccatttgacccagccatcccattactgggtatatacccaaaggattataaatcatgctgctataaagacacatgcacacgtatgtttattgcrgcactattcacaatagcaaagacttgaaaccaacccaaatgtccatcaatgatagactggattaaggaaatgtggcacatatacaccatggaatactatgcagccataaaacaggatgagttcatgtcctttgtagggacatggatgaagctggaaaccatcattctcagcaaactgtcgcaaggacaaaaaacccaaacaccgcatgttctcactcataggtgggaattgaacaatgagaacatttggacacaggaaggggaacatcacacaccagggcctgttgtggggtggggggagggatagcattaggagatatacctaatgctaaatgacgagttaatgggtgcagcacaccaacatggcacatgtatacatatgtaacaaacctgcacgttgtgtacatgcaccctagaacttaaagtataatttwaaaaaaaragaagaaaagaaaacaaatgcagcgtctgtagaggacgatcaacagatcctgcagctcttagtgtttccttttgataaatctttgttctggacgttaatattttaaagcatggctttttctaagtttaaaaactatcaaatgtaagcagtatcttataactccctactgactcacgtatttttctttgtcagctcgttttgacaggagccattcaagtagcagacaaagtttcttsagggaagagttcagtgcttgtgsattgcartgacrratgrgacaggactgctcagctgacatccttggmcatgcygatgttggatagcttctrtaggagcattgaarbgttcraaatacyggtacaaaaagaatggataagttttggacataaatttgcatctgtnagtaaacaaagctaatttctaaaaatagatcactaccattcaggattttaaaactagttgttaaattacatattcagtattacaatgaaaatctgaggagtgtaataaaaactttacgcgtttgaaaatgcatgatgccttgggtagtgaaagtctttttaagagatatgtttatccatctgcactgtttgcagtttcacttgaaagcaatacaaagaatcttcatagaaatgtttacattgaaatttcataagagaaggaagacagacaattctttctcaaataatatagctattagagtcaaatatattttatagacttttagttgaggctttttatttctgatatgcattttaaaaatcatcgagagatgawtaagttcaaaagagctattgtataacatgatgactgtagttaatatatttttgaacaatgttaaaagaatggatgtaaagttttcttaccacaaaaatggtaactatgaggtaatgtgtatgctacacattaaacagacagtcaatatatataaatttctctctcaattaaaaataaataaaawttttttaaaataacccccccaagaaaatttttttaatgaaatcatcaaaagaacatactaaaattcatattcctaggtcttatttccagatgccctctgaatatacattttgacccagctccccagtgattctcatgaaggggatctgtaggctaccctttcagaaacactgctatgtatccttttagccttcacccaggtttcatagtgtgaataacattttcaagtagaaagaatcattgtgtttttttgcttgtttgtttgtttgtttgtttgtttttgagatggagtttcgcccttattgcccaagctggagcgcaatggcgtgatctcggctcactacaacctccacctcttgggttcaagcgattcttctgcctcagcctcccaagtagctgggattacaggcatgcaccaccatgcccagctaattttttgtatttttagtagaaatggcgtttcaccatgttagccaggctggtctcaaactcttgacctcgtgatccgcccacctcagcctcccaaaatgctgggattacaggcatgagccaccacacccagccatagaaagaatcattgtttagtaaatgaatacattgtgagattttttggttttgtcttgtttttaagagagaaagaacatttaattctaatcatcataccttttggacatgattttaagtcttgaaactttaggattgttttcttcgcgactgaaagaactaggttgagtgtattgctaacatactatgtaggataatcatgcccattctatccatagctgttcaggacttgtacaaaattctgattatatgaaataattgtaataatcacctaggatgatgattctttggcaatttttattggtattttacagacatttatatacttaatttccattattttgaaaccttacattgcctatattgccatggaagtatatattatttcctctctgagaaacttggcatttagaaggcacattgctgaattgtattgtcacattttgtgttatatgctttctcagttttgtacccattaattaaaacaaattatcttcatcaatttattcagyraataggtcatggtgataaaaaccacaccgatgctgaccgttctcctatttttctccagtttattgattrtgtgtgrcaaatgtsaaaacaggtaaggaatatgagggatgaaaatacattcaactcattgtttaaattaaacattttaatataatgattgggatttgaccccaaaataatacagggtagagctagagatgaagcaagactgggcatgtgtgaatacttgcagaagccaggtacatgagcgttcacctttttattcctgctactattgatatatctgggattttccctaataaagttttaaaaattaagtatttaactctgatgtctctactagtggaattgacaataccaagtcgtcgtttatatacattttacactgacccttatatatagctgtgtctgctatctcataatagcttaaataactaaactacactgtacctgcaggagaacccagaaaatcagcctgtttatctcattttcctctttattgctttatttaacacttaaagtgctcagacctatataaactgctaaaaaaagaacaactgtagtgtgtgtgcagattacagcctctgctgtccttcctagagccctacaatgtggcagcatttgtttacttctacagtgtatctttctaattttataaagtttcagtcccagtttttcatgctttgtttgcttgtttttgtttagttccctacagcttttgaattcaatgaacaatttttgattataattttggatcmtcygtatagttgcygatttggtactttcttattcaactgtgaatctgctygagaaagacaggtgagttaaaatgctattttttttgatacattaggcttgccaaaatgtatgtagtctaccatgaaatataaaaaatatgatagcttgtaagacactgtctttgacctcaaagagtaggaattacattaaaggtatgcattttgtgttatataaaggaatacctgaggctgggtaacttacaaagaaaagaggtttaattagctcacagttctgcaggctgtacaaggagcatagtgccggcatctgcttagtttctggtgagagcctcaggctgcttccactcatggcagaaggtgaaggggagccagtgtgtagagatcatatggtggaagaggaagcaagagagaggggagagggtgccaggctctttgtaacaactcagctgtcttggtaactaatatagagtgacaacaaacacctaagagagagcattaatctgttcatgagggacctgtcctcatgacccaaacacctcccactaggtcccacctccaaaattggggatcagatttctttttctttatttttttgtttgtttgttgttgttgttgttgtttgagacagggtttcactgtcgcccaggctggagtacagtggcacaatcttggctcactgcaacctctgccttcctggcttaagcaagattctcccacctcagcctcctgagtaggtgggaccacaggtgcacaccaccacagctagctaatttttgtagttttagtagtgatggggttttgccatgttacctgggctggtctcgaactcctgagctcaagtgatccacccgcctcaccctcccaaagtgctgggattgcaggtgtgaaccactgcgcccagcctggcgatcagatttcaacatgaggtttggagagaacaaatattcaaactatgacagaggttcccccaaaagtaaaaatatagctaccatacgatccagcactcccactattgggtacatatctaaaggaaatgaaatcatcatgtcaaagaggttatctgcaatctcatgtatattgcagcagtattcacagtagccaagatatggactcaacctgtgtccatcaacagatgaataaagaaaacgtagtacctatatacagtagactactactcagccataaaaaatgaaatcctaccatttgcaacaacataagtaaatctggaggacattatgctaagcgaaataaaccaggcacagaaagacaaataccacatgatttcccttatgwgtggaatctaagaaaacttgaacctatagtaacagagagtagaagggtagttaccaggggctggggaaggggtaagggaaagaggaacatagtggtcaaaagatacaaaccttcagttataagtactaaagacctaatgtgcagtatggtaattatagttaataataatgtatatttgaaatttgctaaaataatagatctcaagtgttctcactgcaaaaaaaattggtaactatatgaggtgacagatgttaattagcttgattgaggtgattatttcataatgtatacatatatcaaaatatcacatcgtataccttaaatatatacagtttttatttgtcagttgtaaataatactgggggaaaaacacaattgtttctgggaaaagaggtgagagagagcactttttttcataaccttgtcaaactatttgactttttaaactatgtgcatatataaaaataaaaagagtaacatgcaaataaatacaatgtggtatatagattttggcatcaaaaaggtacaactgaggttttaggtggattcagagaaaggcaaaattatgctgtcgttattcatgaaatgaaatacatatgtttaagacatttcttttatttttcttttgagatggagtttcgctcttgtcacccaggctggagtgctgtggcgcgatcacggctcactgcaacctctgccccccaggttcaagcaattctcctgcctcagcctcccaagtagctgggactacaggcgcctgccaccactcccagctaatttttgtatttttggtagagacggggcttcaccatgttggccaggctggtctcaaactcctgacctcaggtgatccgcctgcctcagcctcccaaagtgctgcaattacaggcgtgagccaccacacccggccacgaaatttctttagtcacttattttgggatgttctttttggtttccagttttagcttattgctcttttcttattaaagtcattactaggaaaagtttcagattctacctttggtaattttaattcttgtatttttatttccctagctttgatgttttttttttttcttcctctctctagtttatggtcaaaattttgtaaacgcctgcaataaaaagcaatgaaaatgtgaatatctttatgagatggcaacactaggctgaaaagcttagacttcgtgtagtcagttatccagatgttttcaaagatatggatgttgacatgatgtagattaaacatctggatggttgattaaaataactgtgtccagatgcctactgtcaagtagacacagattaagatttcatagttccaacaaatggaaaagttttaaaagtcattgggatcttaggataatttttcttttcactgaattaaaaagagtataccacccatctgttcataaatgttttacctagctgggaatactcttctttggtcagtgaattgcatttaatggtacagtatcctgcgcccctgtcttcaggcagaaatagtggctctcaagctaggccattacctatgcaaatatcgataagtggctgccaagcactcactggcccatgaggctttttgagctattatgaggataatgtaaatgtgtgattcaatttgatgctgaactgtattgctacaggctgcaaaatggtttgtggatttatgtgtgtttttacttaggctctccactttctctctctgtctctctgtagaaggttacagaaaggactgtttctttatggtcactgataaacagtaataaagaaaaattcaaaaaccccttctatactaaakaaatcaatygagttttatawccagttgccagtatgcgtcacttggaactctgggtgaattactacattagatggaaccccaggatcaagcaacaagtaagtgaagtagcactgttaaaagatagcaatgtcaactgcttgccttagataatgttatttggtatggattttttttaacagcatgaagaaaaatatcagactctaaaaacacacttattgttaaactcaaccttaatttaaattttttttaattactaaaccatgtgttttgatgttaagctgcaattcttctgccaatgtgatataattgtttactataatgcaagctgatttaaagctctagaaaatttgagttttcatagccagagatttcctttgatcacttgaagtagttattcattatatagacattgtttgaaaattctttacattgactagacttagatgatcctgttaagaaaatgtttgctactctcattcaggtgtatgcactagatcagctaacatcagattgcttttcactgagggtatttacttctaaaataaagataattactctgtcaatggtagtaaattcagttggccatttatcaaacaaaaatggaaacaatgagtttgaagtgaaagactctacattttgttaaagacacacttgggctttccattctcccacctccactccatccataatcagaaggaaaaacagcctgcagtacttcagtttattgatttgttctaagcattataaatattcagtatttgtgatggttctttgtaaaggtttgcacattttcctgcagtgtgggtggtcgactacctgttctcacagttcagtcttgcataagcaccagctttaatgccagaaataggctggccacagcagggtcccatagctgtggcctctctctcagattgttcattcctctcaggcagttggctgcatgccagtctgtgccctacctcctcactggagaagtgcccatttcaagctggcaccctcatttcaaggtctgtgctactcacgtgaaaggcttttgcaatttggtaatggttgaaatgtgtattcttttggaaagtgacagattccagggcttgagaacattcacttgtttagtttggaatttgagaagcacatgggaggaatttatttaacagtagttctagcattttggaatatcaagtaaagaataaataataatccttacagaattctaactgcttttacaagagatgtgttccttattaaaaaatktttttatagatgagcactgtgtttgtcctataaaataagccttttccatatttgtcatggcttgtttttaaaatattggcaatgagaaagtacggacagtttttgtgtaagtcctgtaatctcttctcacccatttgtacttggagaaattcttgaaattcaaggaatttggagcagttcatttctgaattcctaaaggtaataatgataattgtgtgacaggtcaagtttgagggtacatcattagaagaacttcttagaatgtatttatcccccttagtctcacagatcttggcaaaatggaactggcctggagaggagtgctcattctctggtaggggtttttacttcgagacaggaattggcctatattatgatctattggcatgaattcagaaaagaaataacttatcctttctatgtggattttctgaatatgaaggatcctacacacatctttatctccctaggcactttgtgttttcatctaccaaatattgaatgttctcatgcgtcaggcactagggggatgcagagattaagaagaaatggtctccgcccatgagtagctcccaagctggtaggggcggccagaaacataagccaatggttataatgcacagggataagtgtaagaataaaagtatgaattaagtacattaggtttgcttaaagatctgcttatgtagaacattatttcatacagaaatagattaaatcgcataggacttttaaaagtacataatataaacctaaaagaatgtacttaaccacttaaaagttaaattgttattcagttgtgtgagccagaaggtattcaaacaattactggccacctgtagtattcacagcactatggtggtatactatcaatgttgaaagatacaaaagaatatacagcctcataatgagctgttagcctcaaagaaggcaggattagtgtgcttttaaaagcaaaagccaccaacccttgctgacataaaatctcagcagagtttatggaaagaccaatgcttacatttgaaaagctatcaataagcagatctggtacttttatttaatacaaggaaattactcatgtcaaaagcatagtcatattacaaacctgagtaggaattttggctgccagtgaccatcatacggtactctaggaaccactgcattccatgtagctgttaatcagggttacactggatgyactgaaattttatatagtggtaactgaaggatgagattcaggacaaatattagcaggttgacctgtgtggcatttgtttcagtcatttttgatagaaaaatttaaagggatatgaatatgaaaattgtttgaagcctacaatacttccataatgagctgattgcctatcttcttttccatgccaagctgagacatactttataattcatttcccaagtgagaagttgaggtataatattttgtcacttggcttgaagttttcatttcttgttgtctttgtattctatcacaaatggactcttctcttcttttacctgctctaagtggtttgtgtttgtctgtagcccaataacttctatatattttatacccattacttgactgaattatctttttatttctaacagtttttctgtttactcttttcagttttctgatgatacagtcatgccatctgcaaaaattactgttacccgatttctttttcttatctaattgcacatgctcattgtaatattcaagctgattctaaattctaatactcatatttcaaagggaggttttaaaaatagccacagttttggaggagaatatcaaggaagaacctgccctgctatatagcaagacttatttggaacagagtagagcccagaaacagacctgcgtcaatgtggagacttggaatagtaagaaggtggcaatgtaacacatccctatgagtggaatgttcagtaaatggtgctgggactggaaatgaaagttaacatgtcaaaacagaactcctcatgtttcccccaaaacctcctcctcctgccatcttccccatttcagttcgtggtagcgccagcctagtcgccctggtcaggaaccttagagtcatccttgacacctttctctcccacaccccatgtccaatcaatctgtcaggagagcttgttgggctctgccttcaaaacacagctagagtccaagcacttctcactgagctcccaccaccatgctggtgtgtgctgcctgccatctcccgtgtgtggcagcgataaccttctagctggaccccctgatgctacctttacttctttctactcttctcagcatggcagccaaagcagatcatgccactcgcctgctagaaactggccaggtagctgctcacctcacccagagtcaaggcgcaagtccttacaatggtctctgaaacctcgtgtgactgccaccccaccccttacctctgtgacctcctggcatcctcaccaacaacctttctcacatgctcagcttcagccagactggcctctgctcttcttcaggcactcaggtatccacttgacgccctccttcatctcccttaagtctttccccaaaagtcacctcttcagtgcagctcactctgaccatccagtttagagtggaatcctgttaccctgctctagtcttctgtagaattgatcaccttcaaacattctgtgaaactcccaggatcgttatgttcgttgtttgtccgtctccccctgctagaagataaaggccataaaaataggtatttgggcctcctttgttcactgctggatcctgagcacctagaacagtgtctggccctcagttgaattttaagagaaaaatgggcaaaggatattagcaagcatcccacagcacttactgggtgttaggcattctaccaagcgtaatgctatatatgcatttttgaaaagcttccactgccaggccacacactaaaagtcacagtgatcatagggagaatgggattaagaggcttctgcaatcctatgggcctttgtaaccagagcactaatgaaagcagcaatcgcagtagaaatgtgggcacggttccatgtctgctgcatttgtacctggctttagctgattcacgccttggctgcctgtagtgggtagaatggtgtgtcccccaaaggacagcgacccacagcctgtgaatgtgaccatatttgggaaaaggatctttgcagttgtgattaagtttaggatctcaagatgagatcattctagatttagggtgggtgggccctaaatccaatgacagatgtcctcctaagagaaaggaggggaagatttgagacccagacatagaggagagaaggccatgtgaaaacaggcagagattgcagcgatgctgccataagccaaggaacacctggagccactagaagctggaagaggtgaaaaagaattctcccctaaagcctccagagggtgtatggccctgctgacaccctaatttggggcatctgccctgcagaaccatcagagagtaaatttctgttgttttaaaagccacgcaagtttgtgttaaattttttagggcaacctcatggctcatgctcccttctctaggatacaggttctagaaagtgtctgcttctaatagagaccattctcctgaacattaaaaattggatccaggccagatacagtggctcacatctgcaatctctgcactttggtaggctaaggcaggaggatcacctgagcccagaaattcgagaccagcctaggcaacatagtgagaccccctcctccatctctacaaaaaaaaaaaaaaaaatgttttaagtagccaggcatggcagtgcatgcttgcagtcctagctacttggccagctgaggcaggaggatcgcctgagcccaggagttcgaggttacagtgttcaagattttgctgagctacgattgcactgcactccagcctggcaacaaagtgagaccctgtctctttaaaaaaaaaacagaaacgtaatactaaaccgcagcattcttcatcagtgcattgtcttcacagcttccttgttggtgtgcacagcttcagcaaatagttcaacacagtagaaagcaggatggttctggaaaccactacatgtggaaggcacttctgtagacgtttggcttttttctttttttttcttttctttcttctaaaaaaaagggtggggggatacatgtgcagaacgtgcaggtttgttacataggtatacgtgtgccatagtggtttgctgcacctattgatccatcctctaagttccctcccctcaccccccactccccaacaggccctggtgtgtgtgttcccctctctgtgtccatgtgttctcaatgttcacctcccacttatgagtgagaacatgcagtgtttggttttctgttgctgtgttagtttgatgaggatgatggcttccagctgcatccatgtccctgcaaaggacatgatctcattcctttttatggctgcatagtattccatggtgtatatgtactgcattttctttatccagtctatcactgatgggcatttgggttggttctatgtctttgctattgtaaatagtgctgcagtaaacatgtgtgcatgtgtctttatagtagaatgatttatattcctttgagtataatgggattgctgggtctaacggtatgtctggttctagatccttgaggaatcgccacactgtcttccacaatggttgaactaatttacactcccaccaacagtgtaaaagtgttcctgtttctccacagcctcgccagcatctatcatttcctgactttttaataatcgccattctgactggcatgagatggtatctcaytgcggttttgatttgcatttctctgatgatcagtgatgatgagctttttttcatatctttgttggccgcattgtgtgtcttcttttgagaagtgtctgttcatatcctttgcctactttctgatggggttgtttatcttttatttttataaatatgtttaagttccttgtaaattctgaatattagacctttgtcagatgagtagattgcaaaaattttctcttattctatagattgcctgttcactctgatgctagtttcttttgctgtgcagaagctctttagtttaattagatcccatttgtcaattttggcttttgttgcaattgtttttggtgtttttgtcatgaagtctttccccatgcctatgtcctgaatggtattgcctaggttttcttctagggttttcatggttttgggttttacattaaggtcttcatatattgcttaagctttctagaaagtgcttgcccctgatcccttcaaaacattaactttctggagtactgttctgttgtatatcttgacctgggtgtgattacctaaatgtatacgtatgtcaagattcactgagctgaacatctgaagattttgcactgtgtgtggtttatatctcagtacaaaacttttaaaacttaacatgctgggagagtcacgttatgctccagcctgacttctgcctttgtatcaacatcaatcccttgtttactcatcaaagtagtcaccattgtagcaaaacagatgctattaactcrcttcactcacacaatgccatgtgagggctatgctgttttgattcccattttacagatagggaaatggaggcacacagaaggtgagggggcaaacccagcattcatacccaaggyggagcattgcagagccgctatggctgtcagccatgtattcagatgggcaataagcacatgaaaagatgttctagcagagcaatacaaacgaaaactaccgtgacataccatgtcacagccctcaaattggaaaaaagaataataatcgtatgctcccaagttctagtgagaatgcagaacaatgggaactgccaggtatcaccagcaggagcctctctgcaggcaatttggcagcatctggtgaggttgaaaagaccatattctacttctcagcagttccacccctaggaaaattccttagagaaacactcgcatatgtgcttgaggagatgtgtacaaggatactcagtacagcattgaacacactaccgaggagccctggaaatcactgattacccatcagcctgggaaggggtggagaaactggtttattccttcaatgcaacttaacaaggatgaaattcagaaaacatgttgggtcaaaatgtcaattgataaataccagatggtaccagtgatgtaaactttgataaaacacaaagtaatactgtattttgttgctggatactcacaggaaaagtgtcacaaatctgcacaaaaaggaaggtcacatggcaacttgagaagagttgtccctcagagtgaaagaggacagtgggtctgggacgggcaacacgggagactggagctgtgtctcggctgacacattttcaaagatagtgacacgtgtgaggaaatgtgtacattaggtatttcttggtgaacaaatacttagtacttgggtgtttagtactctgtgttgtactttcctgtatgtgtcaatgaggcagtagttaaggaaagtatgtattatggtaaactttgagtaaagggcttatttacaaatcagcagtcacagcagakgggtggaacacgtgagttctcatgacgtgcgtggcataaagtgtaactcaagtctctggttctctccagcagccgaatccagtggagcagcgttacatggagctcttagccttacgcgacgaatacataaagcggcttgaggaactgcagctcgccaactctgccaagctttctgatcccccaacttcaccttccagtccttcgcaaatgatgccccatgtgcaaactcacttctgaggggggaccctggcaccgcattagagctcgaaataaaggcgatagctgactttcatttggggcatttgtaaaaagtagattaaaatatttgcctccatgtagaacttgaactaacataatcttaaactcttgaatatgtgccttctagaatacatattacaagaaaactacagggtccacayggcaatcagaagaaaggagctgagatgaggttttggaaaaccctgacacctttaaaaagcagtttttgaaagacaaaatttagatttaatttacgtcttgagaaatactatatatacaatatatattttgtgggcttaattgaaacaacattattttaaaatcaaaggggatatatgtttgtggaatggattttcctgaagctgcttaacagttgctttggattctctaagatgaatccaaatgtgaaagatkcatgttactgccaaaaccaaattgagctcagcttcctaggcattacccaaaagcaaggtgtttaagtaattgccagcttttataccatcatgagtggtgacttaakgagaaatagctgtatagatgagtttttcattatttggaaatttaggggtagaaaatgttttcccctaattttccagagaagcctatttttatatttttaaaaaactgacagggcccagttaaatatgatttgcattttttaaatttgccagttttattttctaaattctttcatgagcttgcctaaaattcggaatggttttcgggttgtggcaaaccccaaagagagcactgtccaaggatgtcgggagcatcctgctgcttaggggaatgttttcgcaaatgttgctctagtcagtccagctcatctgccaaaatgtagggctaccgtcttggatgcatgagctattgctagagcatcatccttagaaatcagtgccccagatgtacatgtgttgagcgtattcttgaaagtattgtgtttatgcatttcaatttcaatggtgttggcttcccctccccaccccacgcgtgcataaaaactggttctacaaatttttacttgaagtaccaggccgtttgctttttcaggttgttttgttttatagtattaagtgaaattttaaatgcacagttctatttgctatctgaactaattcatttattaagtatatttgtaaaagctaaggctcgagttaaaacaatgaagtgttttacaatgatttgtaaaggactatttataactaatayggttttgttttcaatgaattaagaaagattaaatatatctttgtaaattattttatgtcatagtttaattggtctmccaagtaagacatctcaaatacagtagtataatgtatgaattttgtaagtataagaaattttattagacattctcttactttttgtaaatgctgtaaatatttcataaattaacaaagtgtcactccataaaaagaaagctaatactaatagcctaaaagattttgtgaaatttcatgaaaactttttaatggcaataatgactaaagacctgctgtaataaatgtattaactgaaacctaacactgttttcagggctgtgagtgtgcatgtgttggaaatgtgcatggtggccatctgatttctttgcccgggtctgcttcatgtactttttatctcaccggcaaccttgcagggctctcccaaaatttcagcaagattgggcatttaagtgtattaaacagtgcagattttaagagtcacgactgtctatgaggatggcttttgcaaaagtgaacgcgcaaaactccaggctctgaatagggaacacagcagttgatagtaagggatgcgaagatactggttaaataagccatagttgacgtctcattaggtaagaatttttaaaattcttcaaacaatattgccagttggagattatgtcgtttacatatgtacgttctaagaatgctgaatagttgtagcagtaaactaaaattgaccattttttggcaatcagaatagatcacgtggaacagagcttaaagaaaaaaaatcagaataggactcttaaatgactaagtgtatctttcataacgatgagtatttgaagtgctttgtgaagtccttcctcagacattgcctcattgaaccctcactaggaccttatgagctagggggcattctgttacccctatttttcgactgaggagaatgctgttgttgcaggcgttcactgacatgccccacgtcctacagcaccaccacaagtttcatactggtgttagcctgaagtctacatttgagttcccactgaatggcctgagctctgccttcttcattgaaattgaaagaacctctcttcctgggacaactcttcaaataattcggaatcatatactttttagtataggttttgtttctaaatatagtcatagcactttctgacctgtttttgataatgcagcaaagcttatccttttgctttcttggagggaataatattcaaaaagtctcagaataagctgagtagtatcttrtcacttgcataatgcagctctatggtgtcattcagacaactcttgtggcatttgggtacattaggcaaaagcaggactgtctaaaaggaaattcttaatgtgggaatgtattaaagagtgtatacagctgttactggaggatgcacccactggtggccattaaagcaaaaggggacacccgagagaaatgggaaatgtatgcagtgcgcaccccacaaacaagaataatggcatatttgcagaaaagcgttacatggttgaactacatttcagttgaattttttaggtttacagaaccactaccagtatgaagctagaataccaatatttgaagtagtctgacatgccaaacttcattggtagatttaaagttaaggggttgttatcaaggtcttccttccatattgaacatacttggaagaggaaagggtagtaaaatgcagtattctcactttcttatgaggcttagattcagacatggattagttcttatttgcaatttctcctttaaaatcgaaggtgataacatattttaaacacataaagtggttcaatgcttagacacgaccattaagccttagcagtttgtttctccggcttttgagagcgctgcttattcatttacagtggttctgaaattgtttcacagtggcttccatgcaaattataaaagttgcttacattttatgaactctgtatcacaaagctatattagaatcctggatgggatgtgtggaaaccagggttctcatcggcaccagcactgacttgtggccctatttcctgaaggaaagatgtgagtgaagtcctcctagctcccagatgctacagatatggagaaggcctcagcctccatctgctcagtgagggtgtgggctgcacgttctcaaagtttccttacaactgaaacacagcccttctcagaaatgcatttttaatgacatttcatgcagagattcacctttttaatttttttaaaatttataactgacacattgtaattgtacgtacttatgaggtaaaatgtgatgtttcaatgtatgcatataagccaggcgcagaaaaacaaacactgtatggcctcacttacatgtggaatcttaaaaagttgatctcatagtaatagagaatagaatagttaccagagactgaggagggtagtgggaaagaaggtaccaggagaagttggtcaatgggtgcaaagttacagttggagaagagtaagttttggtgttctcaaaaatgcattttaatcacatgtgcatgtgaaatatttatcacacaagatggcatttgcctcatgagtttcctgtttcttctgtaagaaatcctcacgaacttagtgacttcttaagacacaaatgcattatcttaaaattctagaggccaaaagtctgaaatgggtctcacggttaaaatcaagatgttggcaaggctgtgttccttctggtagctcaagggaagaattcttctccttgctttttccagcttctcgtggccacctgcattccttgatgccatggcctcttcctccatctccaaagccagcagcagaacatcttcaagtctctgactctctttttgcctccctctttgacttttaaggacctttgtgatacattgggcccatctgtatagcctagaataatctacccgtctcagggtcagctaattggcaaccttaattccttcttgtcttgtaacatattcacgggttctggggattgggctgtgggcaacttgtgtgtgggggtgcattatggtgcctaccacacctcagttcctttagctttggatggtcagagagtatgcaaggtgagaaatcagacactgctaggctttcctattacaagctatgcaattataattaggtaaatgactagttcatttccttatatctcagacaaaatttacacttacagttgccttcagttttattctctatttctattgttgcttctatccaaagccccagaccatgtacttcaactcccttggtctctaaatggaagaaagggagctattaatttgggccatatgtgccaaacactgtactatttagcctccccataaccttataaaattgatcataattttttggtcattttacaaatgagagaggctcagagccagaagtattttttatttaaagtaagatcacttcaacaaatattttctattataacacagacccgtgccagctgtcgaaatacaaataaataaaacagtaggctccttcaaggagcatctggcttagtgggaagacaatccagttaaccagtaatttccaagcagggtgctgcctgcaaggatagagacagatggtggacttctgggccagtatagggaactagggaggaacttcttggcaatattgtcagaactgagccttggaagctaagtagacatgcaaggctggtttaacatataaatcaatgtaatataccacattaacacaatgaaagataaaaaccataaaatcatctcaattgatgtggaaaaccatttcacaaagtttagcatcctttcttttatgataaaaactcttgatagtttatatttaaaaagtttatcaacataataaaagccatttatgaaaaacccacagctaacgtagtcaatggggaacaattaaaggcttttcccctaagatccagtacaaggcaaagaagctcactcttgccacttctattcaacgtagtacacagtgccaggtgcagtggctcatgcctgtaatcccaacactttgggagaccgaggcaaggagatcacttgaggctaggagttggagaccaacctgggcaatatagcaagatcctgtctctacttaaaaaaaagccaggtatggtggtgtgtacctgtagctccagctactcaggaggctgaggcaggaatttgaggctgagcccaggaatttgcttgagcccaggaatttgaggctgcagtgagctatgattgcaccactgcattacagcttgaatgacagagcaatttcagagactgcaccctgtctctgaaaacaaaaacaaaacatagtattggaagaactggcaagagcaatcagacaagaaaactaaaaggcatacaaatcagaaagtaagtaaaattatctctgtttttatttttctttgaggcagggtctcactttgtcacctagactggagtgcagcagcgtaatcatagcacactgcagccttggcctcctgggcacaaacaatcctcctgcctcagcccctcaagtagctgggactacaggcatgcactaccaagcccagctattttttttttgtattttttgtagagacggggtttcactatgttacccatgctggtctcaaactcctgaagtgatctgcccacctcagcctcacaaagtgctgggattacaggcgtgagccactgtgcctggcccaaaattatctctatttggagatgacatgatcctatatgtaggaaacccaaaagactccacacacaaaaaagctgttagaactagtagatgaattcagtgaagtttcaggatagaaaaatcaatgtacaaaaaccggttgcatttctgtacacaaataacaacctatccaaaaaagagatcaagggaacaatcccatttacaatggcatcaaaaagaatagaatgcttaggaatagaatgcttagaaattttgccaggagggtgaaagctctgaacactgaaaactgtaaaactctaataataagaaattgaagaagacacaaataaatggaaagatatcccatgctaatggattgaaagaattaatattattaaaaagggtcatactacccaaggcaatatacagattcaacaccatccctagcataatggaatactacacgcccaggataaatgatcaaaccacagctacatgcaacacagttgaatctcataagcatgttaactaaaagatgccaggtacaaaagaatataaagtagctcccccttatccatgggggatatgttccaacaccccgaatggatgcttgaaaccacagatagtaccaaaccctatatatactatgtttctttcctatatacacataactatgataaagtttaatttataaattagacacagtaagaaattaacagtagttaataacaaaatagaacaattataacaatatgctgtgataaaaattacataactgtgttctctccctttctctcccactcttcccctcttgaaatactgtaatattttcagaccattgtttatcatgggtaactgaaaccatggaaagagaaacctcaggtaaggggggaaccactgtatacaatattattccattcatataagttcaaaaacaaactaaattcatgttttgggatgtatgtgtggtaaaacagcaaagaaaagcaaagaaaccatcaccatagaagggaacactatgagcagaagcaaatggtgcattaagtaggatgcagcatttgtggaactcaaagcaagcaggtattcctgagtcgtaatgtgaacgggcctggcaaaagatgactgagacgcaggcaggggcaagtcatggagtgccttgggggtcatgggtgggagatggattttagggtggcaaggctggggacagaaaggcaagtttgaggctgatgtagttgaccagatggggagaactgagcctggaatagagacaagtagagatggagattgaaaaaaaaatttttttttaagtttgtgactgaaaaaaagagacaagaaagaagtcaaagatggtactgaagttgctggtggctgcaattggttggcaagtggtataattttcagaaatagaggatatcaggagaggatcgagtctagagcaatgctgaggccagtttgggatatgctgaatgtgaggagaacaggtgtccaagatgtggttaagtttagctctgaagctcacaaaagaagtcggaaacacagatttggggataaaactatggaagtagatgacattgcccatgcaagtaaatggagaaaagtggcacgccccaactccagattgtacgggacagacagaggaagaggagacttgggat

SEQ ID NO: 95855 - DNA, 22358 bp, Homo sapiens
agattacgaggtcaggagatcgagatcatcctggctaacacggtggaaccccgtctctattaaaaatacaaaaaattagccgggcatggtggcgggcgcctgtagtccgagctactcaggaggctgaggcaggagagtggcgtgaacccgggaggtggagcttgcagtgagcggagatcgcgccactgcactccagcctgggcgacagagcaagactctgtctcaaaaaaaaaaaaaattagctaggcatagtgccttgcgcctgtagtcctagctcctagggaggctggggtgggccggaggatcacctgagcccaggagcatgaggctgcaatgaactatgattgcaccactgcattacagcttgggtaacaaactttgttttgaaagaaaggaggaaaaagaaagaaggaaagaaggaaggaaagaaaaggcagagattgcagtgagccgagattacggcactgtactctaacctgggtgacagagtgagactctgtctcaaaaaaaaaaaaggttttattaagatatatttcaagaagcatacaattcacccatttaaagtgtacagttcacagatgtgctcaactgtcaccacagtccattttggaattttttttttttttttttttgagaccaagtctcactctgtcgcccaggctggagtgcagtggctcaatctcggctcacttcaacttcaacctccgcctcccaggttcaagaaactctgtctcaaaaaaaaaaaaaaaagatttgcttaaaagttaacatctcgggctgggcacggtggctcacgcctgtaatcccagcattttgggaggccgaggcgggtggatcacgaggtcacccaggctagagtgcaatggtgcaatgtcagctcactgcaacctctgcctcgtaggttcagtcatttctcctgctcagcctcccaagtagctaggattataggcgccaactactatacctggctaatttttgtatttttagtagagacagggtttcaccatattggccaggctggtctcaaactcctgacctcaggtgatccacctgcctgggcctcccaaagtgctgggattacaggcgtgagccaccgcacctggcctaatttttgtattttttgtagagacagagtttcaccatgttgcccaggctggtctcgaactcctgagctcaagcgagtcttcctccttagcctcccaaagtgctgggattataggcatgagccaccacccacacttcttttactctaggaaacttgttcagaagtccatttgctatgatctcaacatgtagtctttcaataatgagcccctaccaagcaggcatccccacctgactgcccgttctccttaaaggttgcatgtattgcacagtgcaaaggaatcacctcccctattgaagacaataactcaacgaacatacatctgtgtgtacttttatcatctccttaagagaaatgctgagaagtgggatattagggtcaggggccaactttggtcttgaaccaaagttctgggagcaaggttctgggagcctgggagagaggtaaatgatttagtccttgtccttcaatagtccagtcagcttgagatgagattcaagaaagggaaaaggagatttcaatacttaatgctactgggtgtggtggctcatgcctgtaatcccagcacttttggagactgaggctggtggatcgcttaagcccaggagttcaagaccagcctggggaacatgacaaaacccagtctctccaaaaaatacaaaaatgtgccaagcatagtgggatgcgcctgtagtcacagctacttgggaggctgaggtgggaggattgcttgaactcaggagacagatgttgcagtgagccgagatttaacactgccctccagcctgggtgacggagagacttggactcaaaacaaaaacagaaaacaaactaaatgctgtgcctcccatcagttcctccctaggaattcatcttgtagatagcacacagacacataagggcatacttactgcatcgttgtaaaagctaatatcctaaatgttcagcattaggggcttgagtaaatatatattgttatggtactaatatggatccatctccaagtaagaagaagaaaggtatagaacagtggtttttatttttatttatttatttatttttgagacagaatctcactttgtcacccaggctggagtgcagtggcacgatcttggctcactgcaacctccgcctcctggattcaggtgattctcctgcctcagactcccaagtagctgggattacaggcacatgccaccatgcctggctaatttttgtatttttagtagagacagggtttcaccatgttgcccaggctgatcttgaactcctgacttcaggtgatccacctaccttggcctcccaaagtactgggattacaggtgtgagccagcatgccagcctagaacaatgttcatatgctgtttgtatattctttaaaatacagacggatttatgcttgtaaagatatagacctgcagccactaaccctaagtggccattgaactattaatttatttattttatgtttagaatcaaagtctcactctgttgcccaggctggagtgcagtggtggaattatggctcactgcagactcaaactcctgggctcaagctatcctcctacctcagcctccagagtcacttggattttttgtttgtttgtctgtttttgagacggagtcttgctcttttcgcccaggctggagtgcaatggcatgatctaggctcactgcaacctccgcctcccaggttcaagcgattctcctgcctcagcctcccgagtagctgggatttcaggtcggtgccaccaggccaaactaatgtatgtatttttagtagagacaggttttcaccatgtcggccaggctggtctcaaactcctgaccttgtgatccacctgcctcggcctcccaaagtgctgggattacaggtgtgagccaccgtgcccagcgagtcacttggattataggcaggggccaccacaccgggctaagtttttaaaaaatgttttgtagagacaaggtttcaccatattgcccaggctggtcttgaattactagcctcaggcaattgtcctgcagcaggctctggagttgctgggattataggtgtgagccacagtgccagcactattgagccctttaaatgttgcaagtacaaattgagatgtgctgggggtgtaaaatgcatactagtttgaagacttgatatccaaaaatgtaaaatatctcattaatttatattgataacatgtcgaataatattttgaatacattacattgaataaaatattacagtaatttcatgtttcttttttactgttttaaatgtggctactagaatattttaaattatgtatgtgggccaggcgcagtggctcacgcctgtaatcctagcactttgggaggccgaggtgggtggatcacctgaggtcaggagttcgagaccagcctggccaatatggcaaaaccctgtctctactgaaaatacaaaattggccaggaatggtggcgggcacctgtaatcccaggtactcgagaggctgaggcaggaaaatcgcttgaacccaggaggcagaggttgcagtgagccgagatcatgccactgcactccagcctgggcgacagggcgagactccatctcaaacaaacaaacaaaaaaacccagaacccctctgtggtcttgcccacctcccccctcactggcccagaggtgacctgactgtgggatttctgtttttttttttttggttttagagaattttattttattttattttatttttttattttattattattatactttaagttttagggtacatgtgcacaatgtgcaggttagttacatatgtatacatgtgccatgctggtgtgctacacccattaactcgtcatttagcattaggtatatctcctaatgctatccctcccccctccccccaccccacaacagtccccagagtgtgatgttccccttcctgtgtccatgtgttctcattgttcaattcccacctatgagtagaatatgcggtgtttggttttttgttcttgcgatagtttactgagaatgattatttccaatttcatccatgtccctacaaaggacatgaactcatcattttttatggctgcatagtattccatggtgtatatgtgccacattttcttaatccagtctatcattgttggacatttgggttggttccaagtctttgctattgtgaatagtgccgcaataaacatacatgtgcatgtgtctttatagcagcatgatttataatcctttgggtatatacccagtaatgggatggctgggtcaaatggtatttctagttctagatccctgaggaatcgccacactgacttccacaagggttgaactagtttacagtcccaccagcggtgtaaaagtgttcctatttctccacatcctctccagcacctgttgtttcctgactttttaatgattgccattctaactggtgtgagatggtatctcattgtggttttgatttgcatttctctgatggccagtgatgatgagcattttttcatgtgttttttgactgtgggatttcaagggattcaatagtataatgcctgccctgccacatacaccctgtgcagatgtatattggctgggtggggggtgggggggatacctgttgtgtttattttgaaaatgcaaatctcggggcagttttttttctggtttttgggctgggtggctttacaaggacacttcccccttccctcctggcactaagggcagtcacatcctcactggaagtagtggctggaggtccagggcataacccctgacccagggaggatgaaccggaaattcagtcttgcagagccctctgcacagcacaggagctgggcaaaatttggagaaaaggaaaggtcacgttcccaccttggccacccctctcaggtggggctggggtcttcccctacccttcagatgcattggcccacccagccccccatcaccaggccctcccttttgccacccccatccaatgcaccttgggtctgggtggctgggactgcacgagaaggggtactcctgccttgctgagctgcagcccgccccccgcaccaccacccgcccagccagaggccacttctaacctggggagacaggatgcgaaagctgctcactacccaccggcttttgggtgcagccttcaggcctcttgttccaggaggcctggaaaacgagcggggctggaaggcatttagataattggaagatgggccgggcacagtggctcgtgcgtgtaatcccagcactttgggaggcctaggtgggtggatcacgaggtcaggagttcgagaccagcctggccaatatggtgaaacccccgtctctactaaaaatacaaacattagctgggcgtggtggcgcgctcctgtagtctcagctactcgggaggctgaggcagaagaatcgctggaacccgggtggcggaggttgtagtgagcagagatggccactgcactccagccgggttgacagagggagactccatcccaaaaaaaacaaaacaaaacaaaaagaaagataattggaagctgctccgcttaaaacgaatgacaaattcagcctccctggtctggtcatcaaagaaacaccaattaaataatatggtgccattggcaccaagttagccaaatcatcaatgggcgtgatacttaattcgcctctctggttgctgacaccctcctcgacccccagccgcggaaatccattcctagttccaccgtttagagcctctcctggggctgccgcgaaaattgggccggttggggtaacatctaacctggggtcccgcgaaagagcccatcagttccgcttgggggccccactgccctcccacctcctacgctgggcgcttctcctgcgaatgacgttttgctgctgctcagcgcagccagtcgcggaggcggggaggctgcgcggtcagaggcgcctggagcgagcgaatcctggcccaccgcctgcccaaccgcgtgaccttgattgagttaatgaacttcacgcctcagcgtccaggtctgtaaaatggggtgtctaacgcagaccgtacagcccagctgggtttagcaaacttccgggagccagttggagcctctccccatccctagcggtgatcccaggtgacgacatgccgcggggggtcctgcggaggccaccctagggcgttgctgctgcctttgggagtgtggagctccaaaccatgtcgcgagaggcggattttgggaggccgggatcctcgcgccagggggatgtgcgagggtgtgggataaatcttaattcctccggcccacccaaagcctggaaatccagcctccgcgcctcttgccctgcgggccccgccctcagtcccgccctcatctaacccgctaccccattggtggcgtccggcggcgcggctgctgttatttttcgaatatataaggaggtggaagtggcagctgcaactagaggcttcccwggctggtgcctgagcccggcgtccctcgccccccgccctccccgcatccctctcctccctcgcgcctggccctgtggctcttcctccctccctccttccccccccccccacccctcgcccgctgcctccctcggcccagccagctgtgccggcgtttgttggctgccctgcgcccggccctccagccagccttctgccggccccgccgcgatggaggtgccccagccggagcccgcgccaggctcggctctcagtccagcaggcgtgtgcggtggcgcccagcgtccgggccacctcccgggcctcctgctgggatctcatggcctcctggggtccccggtgcgggcggccgcttcctcgccggtcaccaccctcacccagaccatgcacgacctcgccgggctcggcaggtaggacaccccaaggaggctgcatatgggggtgagaggctaggtctggagtcctgggcctcctggagaactgggcatggtagtcgaatccaggaggtggagtccggggaggcatcctgagcagtggagaggtacgcccttgttccctcctaggggcccaggacatgggaagtgagacctgggctgtgccccccacacctccaggtgacctgctctcagtctgcacaagcctctccaaatcttctttcccctcactccctcctccctcattgtgcctccaccacgctgcctccgtaatctctgcccggatagccaccattttgccccaggatgggaatctcaagcctggagagggaacttaagggtggcagagccgtggagcactcacacatccatgcccctgctccctccaccccagttctgcccccagaattaagacaattaattaaacactgatcctgctccctaagtctgcaaggggagagctgggttgttccagtaggagaacctggtcttggtccatccttcaggaagggtcctggaaaggtgggggtctgacagtttaggrgaaggctctctggggcggctctgctagaccaccaacccttaggctggcctccagccaggcagccttgctcacaccctgggctcaccttgccctgcwcctgagaggacctttcctaaaccagtcaacgaagagaagacgctttagggcctctgtagaatgaaccttccttgacctgagaagagggggccctcagggccattgctttcccggtgtagtgtttcgctcagttcttttctcagcaagggagtgggaacgtgggctagccaggccttgagccccacgtttacctttctcctttcccgggtccctgttcccttcccagcgaaaccccaaagagtcaggtagggaccctgctcttccgcagccgcagccgcctgacgcacctatccctgtctcgacgggcatccgaatcctccctgtcgtctgaatcctccgaatcttctgatgcaggtgaggcccaggggagcctggggagatctgcctgtghcaggagagtttgtgggggctgcctgggcctcccaatttccctgccgatcaaactaacatcctccccacaacctggtgggcccaggagcctctcccccaccctccacagaaatgggaggaagacacacctcttgtggggctcaccacacccaacgcggactggctgagtggatgagagggtggggccctctacggagatgagatcttacctatgtaaaaccacgctccagagttcctaaaccayaaccctacctgggargcacccagggctgagagttggtctttaaaacattcttagcctataacctcttctttaaaaatctgttgtctcttctagaacaaattattttaaaccagttcaagaaaaatgcttagtgagcattgtggtttaaagacgcatatgaaggaatttccatagtaaacagggagtggagccctgtaccgtctgggggacgatgtgtcagctctcagggtccatggttgggtttttgtttcattttctaatgtgtcaaagtccaaactagaaactgttttttttttttttttttttttcatattgggacatggtgggggaaagaatacagaaagtgccactactttcaaaccaaggtgctctgtcccctcaggtctctgcatggattcccccagccctatggacccccacatggcggagcagacgtgagtagagaagggaatgtgtacttccaagcattcagcacctgtctttaagaatcctagttctaccataaattcacccgggaggcctgggaaagcagacagaccatggggtggcttcaggatccccatggccggggggctcactgactttctcaggccttggcattctgctccctgtctcagagaaggatctgctctcatgggagccaaccgagtgtgggctcagggccagggatagtggggacagtggccactgggagagcagatactagactacagcccatgtcttgcaggaatacaagcccagcgtatgtcccgtttttctttcttgcctatacccatttttttctgtgaaatattacaatttaaaaatatgatccaactaattcaaaactttaactcactctaggccaaacaaaacacagttgcctgcagattgatttggctcttggccgatcagcaacctctgacttcgatgacactttaccctctggccagccctggtctaggccctttctrcaagggaatggagagagagttggtgggctctggcctggacagaccatccccttggctgtgggcatgggtggtgtcttccagagcacagctgttcccatccagttgttaaagcccaagcagcggggcagctgccagccattagtagggacagctgggcatctctggcctgtgctggggactgtggctttgggtttaggatagtgacttgtcttacctcccattgcctttgatcagactgggttgggctgcagattggttcacaaacaggaaatggggagaggattgggtggggttgggggactgcaggttggttttggtggcagcacagagcaatcttgccctacccccaaggcccatgtgcaagccaatgaaattggtcatccctgatgccaggttggctgggcacagcagccccccgggggggcatccccctcatactttatccctgagtggttccctgccctgcacctgctctgacagttatacagagtttctcagaagctgtgtgtgtgtgtgtgtgtgtgtgtgtgtgtgtgtgtgtgtgtgcgcgcgcgcgcgtagatgcacaaaagctccgcgtggcaggtggtctcctgtaacacggctgagggggcggggcctcagagggaacatgtgttggaattccttgcctgctggcctcttctaaggcaggaggagggggtgggacagaggctggtcctggaaaattccataggagggaggagaggatgtgagcctgcacgtttgtcactgggggtctactgtatcagactggagctgactgggggagccctaaagcaggccccagtcctcagaggaccgggagccaggccagctcctcacaggggagaggaagcctagccttgctgttgtccaggccctggagacacccacattgctgggtgcccctggcctatcataggatggatggatgcctttcctggcagccatatggccccgctgaggtgatttgcatacaggtggaaggcctggtgcaggctggcgagactgttgccttggtgacgcctccctgaccctgacctgccccagctgtctctatcactgccattctctgggctttctttcattcagggcagcctttaaaattccaagctgcctcttatcttccccctccccaatacctgggccccctgatggtgggcgttcttcccaccccaccccttccactgccttgagccttggcccttgtctttgcccttactcccccctggactgggggcctggtgctggggtgggtgatgggtgcggagggagcatgggttgcatgggacccttctctgtcctaggtttgaacaggccatccaggcagccagccggatcattcgaaagtaagtgttcctgggcctcttccatctaccacaagctttcccttaggacagggctccagaagggcatgctgcatgctcttggtccctgccctgcctctcccagctctcacctgtccccatttcctcctgtagcgagcagtttgccatcagacgcttccagtctatgccggtgagtgtcttcgaggcctgactgaggcttaggcatgctagccaggcatggggtagatgagcaggatgcattcagggatcacctcccagctgggtgtccccaggcaggctgtaggagatggggtttcagaggtaggtaggtaagtgggaggagctggaggagaggtggagaaggtagggcctgggctcstgccggaggaatgcagccttcattcctctgcctgccgccctgcctggctctctaggtgaggctgctgggccacagccccgtgcttcggaacatcaccaactcccaggcgcccgacggccggaggaagagcgaggcgggcagtggagctgccagcagctctggggaagacaaggagaatgtgcgcttctggaaggccggggtgggagctctccgggaagaggagggggcatgctggggtggttccctggcatgtgaggaccctcctctcccatcttggctgcaggatggatttgtcttcaagatgccatggaagcccacacatcccagctccacccatgctctggcagagtgggccagccgcagggaagcctttgcccagagacccagctcggcccccgacctgatggtacatccagagagcggayccctgggaggggcctggggaggcagcctcggagaagaggagggtggccctgaacccccaggcactgggaacttttcctcaggaggatgggggcgggaactatctccacctctaagtctgtgtctgtctgtcatgtggacagtgtctcagtcctgaccggaagatggaagtggaggagctcagccccctggccctaggtcgcttctctctgacccctgcagagggggatactgaggaagatgatggatttgtggacatcctagagagtgacttaaaggtaaacagccttgtcccaccaggcccctaccttcctatccctgggttcgcccaaaagaagagagctctgagcccttgtggcaggaccatgatgtcattccagtgtcagaagaagaatctgaggtaactgagtcacagcctaacctctggccaatgagagaagaacaggtggctggtgccacagtggagggcggtttgggaggtaggggagcttctcaccccaacctggagtttgccagggaaacagggaaggctgtgctggaggattccgggactggaggggtttggcctatgcctgtgggttgtgaccctgtccttgctaatctggcctcaggatgatgatgcagttcccccaggcatggagagtctcattagtgccccactggtcaagaccttggaaaaggaagaggaaaaggtgggcctctggggtggccccctccgaatttggaggcatggggtccatcctactctccagtggatttgagggatgggacggggcctgggcaccctgatccctaacctgctgtccctgccaggacctcgtcatgtacagcaagtgccagcggctcttccgctctccgtccatgccctgcagcgtgatccggcccatcctcaagaggctggagcggccccaggacagggacacgccygtgcagaataagcggagrcggagcgtgacccctcctgaggagcagcaggaggctgaggaacctgtgagtgccttcctcctggggttcactttggcatgcacctgggcagccacccccttggctaagtttgtggcagagggcaggtggcagcctgggcatggcagagaaagggggtaccagccagccagagcactggggggcagccccaccctgaccctggcctccatctgactcactttccagaaagcccgcgtcctccgctcaaaatcactgtgtcacgatgagatcgagaacctcctggacagtgaccaccgagagctgattggagattactctaaggtacctgcagcagcgaagggggtaccttgggggcttgacctcttactgactaggggtcctctagcccaggggctgcttgggttcctccctttctccccggagccccccttttctttgtcctttgtatcttttcatcctttgttctcacatagactcctccctctggccctccttgtctcctgactccacctcaagtcagtccaggcatctgttgagtctccgtcttatttccaagctcatacctagcttggaaccccctcatgcctcaccttcgggcttggcagagggtagggagcagagtgtggagttcatctcttccacttccctttttcatttctctttccccttggaaggttgttccctgggtgtcagacccaagaggtgcctctcagttgccatgggaaccagaactgaatttgaaggccaaagcaggtgtggcctctgattttgggaatgaaacttcattctttgaggctcctggtcttaccaatttaactttctcccctctccctcatcccttccgttcccttcaggccttcctcctacagacagtagacggaaagcaccaagacctcaagtacatctcaccagaaacggtaaacagcgttgcgtcattttctaggcasatttgggactgtagctccattgttgaccttccctggggacaggctagggccacctgccagctgccagcctgacctgccggaaccaacccccatgacctcctacagatggtggccytattgacgggcaagttcagcaacatcgtggataagtttgtgattgtagactgcagatacccctatgaatatgaaggcgggcacatcaaggtaagatggggcaatggggagaggccctgaagatcccacctggtttaggtccttgctttgccaagagggtgaatgggtggaggacrggtgccccctctcatggggagggttcctactaagagaaggacagcgactgcasrgggagggccctgactcctggacccggggctgtgcctgacctctggctcctctgacagactgcggtgaacttgcccctggaacgckacgccgagagcttcctactgaagagccccatygcgccctgtagcctggacaagagagtcatcctcattttccactgtgaattctcatctgagcgtgggccccgcatgtgagtcccagctccgcccagccagctagtgtctgccctggccttccctgcycaggctcacaggtgctggcaccattgagatggccaggggtgcaagtccaggtcctcctctgtcccatctgatggcctagagctgacctcagccccacttcactgtgcatggtacccgcctcccatctccctcactgtcctgcctatcaagcctcatgtccaccccacatccattactgccaccctcagaaaatttagttccaagtctctagcggtgtcttttctcgaaatctaagggccgcgtgtcagtccccagtacacggaccctccccatgttcagtgctgttaggtctccattagaacctcttccattggcatccacagcacctgggcctccctggctgagctccttctgtcrctattcctgttctgcctggccatctgtcctcccacccctgcctcctcctgggttgccactggtccatatgactgctagtggctccccagcctggcctcacccatgtggtgggaatctgcacccagacgccccttacagagtcgcatccctgyggccctcccaacttctccaggcatcccagcatatggcacccacctccacctgggcaccgggcctgggcactggcttcagtcttgggtcctcctcctcccttctccccaccactgatcctcaccaggtcttgtccaggagtggcccgaatggatcccttgaatttggcccacttgtctcctctcctgcttctcctttcctggtccaggcacagatatctctaacaaagattgtgcaactgccttctagaaacggagagttcatccccttgattttacctccttccttccrcctccccaccctcttctgtagccagagtgacctaaaagtgttcttgtggttacattcctgtgctctaaagctttctgtggctccccaaggccctcaaaggaggggacgtgggggataggtcccatgatgtacaagccactgcatgccccactctgaccacaccctgcccatgacgccccaggtgccgtttcatcagggaacgagaccgtgctgtcaacgactaccccagcctctactaccctgagatgtatatcctgaaaggcggctacaaggagttcttccctcagcacccggtagcgtgggtggggaaggccacagtctctgtgtgagggttggcttggccaggctggagccatgggatggggggtgggagggttgggtccctgccaaacttacccattccactgcattgacccctcctgtcctgccctagaacttctgtgaaccccaggactaccggcccatgaaccacgaggccttcaaggatgagctaaagaccttccgcctcaagactcgcagctgggctggggagcggasscggcgggagctctgtagccggctgcaggaccagtgaggggcctgcgccagtcctgctacctcccttgcctttcgaggcctgaagccagctgccctatgggyctgccgggctgagggcctgctggaggcctcaggtgctgtccatgggaaagatggtgtgggtgtcctgcctgtctgccccagcccagattcccctgtgtcatcccatcattttccatatcctggtgccccccacccctggaagagcccagtctgttgagttagttaagttgggttaataccagcttaaaggcagtattttgtgtcctccaggagcttcttgtttccttgttagggttaacccttcatcttcctgtgtcctgaaacgctcctttgtgtgtgtgtcagctgaggctgggggagagccgtggtccctgaggatgggtcagagctaaactccttcctggcctgagagtcagctctctgccctgtgtacttcccgggccagggctgcccctaatctctgtaggaaccgtggtatgtctgccatgttgcccctttctcttttcccctttcctgtcccaccatacgagcacctccagcctgaacagaagctcttactctttcctatttcagtgttacctgtgtgcttggtctgtttgactttacgcccatctcaggacacttccgtagactgtttaggttcccctgtcaaatatcagttacccactcggtcccagttttgttgccccagaaagggatgttattatccttgggggctcccagggcaagggttaaggcctgaatcatgagcctgctggaagcccagcccctactgctgtgaaccctggggcctgactgctcagaacttgctgctgtcttgttgcggatggatggaaggttggatggatgggtggatggccgtggatggccgtggatgcgcagtgccttgcatacccaaaccaggtgggagcgttttgttgagcatgacagcctgcagcaggaatatatgtgtgyctatttgtgtggacaaaaatatttacacttagggtttggagctattcaagaggaaatgtcacagaagcasctaaaccaaggactgagcaccctctggattctgaatctcaagaygggggcagggctgtgcttgaaggccctgctgagtcatctgttagggccttggttcaataaagcactgagcaagttgagaaaccagcattgtgtcctgtggggccctgggcaagaccccagaagcccgccaatggcgggattggggtaggagacagggtcagcaaaggcaggaagagttgctggagaggtgccctcatgctcttgtcccttcttctcccaatgtcttccatctcttgggtgacactcctgccaggactttggattcaacccctccttcccctcacctggcctcccaagcacttctaggcttgcccttcctaaactcggcaccaaaaggcaagagtgacctcatcactcaaggatcatcagtggctccccattgtcctcaggataaacttaaagccagctgcagtgactcacgcctgtaatcccagcactttgggaggctgaggtgggcagatcacgaagtcaggagttcgagaccagcctggccaatatggtgaaaccccatctctactaaaaatacaaaaattagccaggcatggtggcacacacctgtagtcccagctaactgggaggctgaggcagaagaatttcttgaatctgggaggcagaggttgcagtgagctgatattgcgccrctgcactccagcctgggcaacagaatgagattccgtctcaaaaaaaaaaagaaaaactcctggcatggccttttgagatttgggccctcgccagcctcattccctcaagaaattgggaaagggccaatctgggagcccaggccaaacccagatctctgaggaaatcctccctgaataccactgcaggtgaccctccccccagccccccacacacaaatgggagctgtgtgatgggagggactcctttatatctgtatatataagatgctgtctttgacacagagtgcacacacatgtcaggcatgattaccactttctgggacagttcatctatgttgtgaagtaggtgatgcaatgattatccaccccgtttttcagatgggaaaatggaggctatttcctatcagaacagaaaaaggggactccagatcccyatgctgagtctaaaggacacttgtgctatctctagcttgttctctcaagtttcttatgcccaagagcttggtcttcactcctggttcagagccctctgcaagggcacaataggtgggagttattggggtgtggttttggtcttggggctgggctgtgctcagggagggaagggacctcaagggttcagaagtcccctccacctagcaggcagcgatagaaaggcaaatgtttatttggtgagaggatttgcccagaaaaggggaaacagctgtgcagatccctgagaaagggagatggaggaggggagaggatgggccccgggcgccatcatgctggcatgcctgctccaccctaagtgcttagggagtcttgtgaagccaccctccctcctggtttcacagacgaaagcagcttcagaagctcacagaaggcactcacttgccccagggcacacacaagatgtaagcagagcagctatcccagccttcccaggagtatcccatccccccttacctcccatcttagtcccagagcccccaggcgggtggggctgggcagcctcacttctgctgtgagcgtcctcttcccactccgggatcaggccacgtgatgaggaggaaacatgggctgagtgtctacaatgcccaggctttgtgccaggtgctgatgtccgtggccacatctgtccccattgtaactcaccatcagagtcttagttgcagccatgggacaattagtatgctctagacacttttagatataatgtctcctaagcccacccaacaggtattcagctcattttgtgggagagatgcgggcattggtcaagccaggagacacctcttccccaagaaaaggctctggtgctgacatctctgctgaggaagcaggagcctgggcctgggcctgggaaagggggtgctgtgggcttgcctctcagtttctgactcgggaccccctctgccctggaaagttcagggggatggggcagaggtgtctcatctcccttccccccagcaagagaagctataactttcttcctggatgtgctaaagggaagtggatcaggcaggaaggcagtttaaaatcccaggctgccagccagttttaaaagttgtttagctttggccagggtggggcaggaattccagcctgcaggagttccgagcagccacgtgctgccagctcacatggttagagagctacatgaggctggcgtaagcacagakagccagttgggggaacagtagtgtctggagggaagggggaagaatcttcatccactccattgtctgaattgttcacccggtaacttttgccatgacaattttacaaattaaggttttcttttaaaattgaggaataattgacatttcatcaagggcacagatcttcagcatggagcgtagacccaagggaccaccacaaagctcaagatgtaggacatctccatcaattcaggaggctccctccgggttacccccactccagaggtaactactattttgacctctgtcacagtaatttagttttatctgttcatgagcttcctataaatgaaattatacagtcagtactcttttgtctggcttctttcacccagcacaatgattttgagattcattattttgtcctgtgtagcaggagtttgtttcttcttcattgctgcatactattccactgtatgaatatacccctactctctttcttctttttttttttttttttttgaggtggagttttgctcttgttgcccaggctggagtgcaatggcacgatctcagtccactgcaacctccgccttccaggttcaagcaattctcctgcctcagcctcccaattagctgggattccaggcccctgccaccacacccagctaattttttttttttttttgagacggagtctcacactgtcgcctgggctggagtgcaatggcatgatctcggctcactgcaacctccaactcccggattcaagcaattctcctgcctcagcctcccaagtacctgagattataggcgcccaccaccacacccagctaattttttgtatttttagtagagatggggtttcacaatgttggccaggctggtctcgaactcctgacctcatgatccactcaccttggcctcccaaagtgttgggattacgggcgtgagttaccacgcgctctctttctcttatcttttaaaaaatatttatttatggccaggcacggtggctcacgcctataatcccagcattttgggaggccaaggcaggcagatcacctaaagtcaggagttcgtgccagcctgaccaacatggtgatccctgtctctactaaaatcaaattagccgtgtgtggtggcgcacttgtaatcccagctacttgggaggctaagacaggagatcacttgaacctggaggtggaggtgcagtgagccgagatcgcagcattgcactccagcctgggcaacaagagtgaaactccttctcaaaaaaaaatatatatatatatatatatatattatttatttacttatttttatttctttcaagataaggtctggctctattgcttaggctggagtgtggtggcgtgatctcagctcactgcaacctccaccttccaggctcaagcgatcctcccacttcagcctccccagtagctgggactatcagtgcatgccaccacagctaatattttttgtgttttttttttttatagagatgaggtttcaccatgttgcccaggctgaatttttttttcttttttctttttttcttttttttttgagacagggtctcattttgttgctgaggctggagtgcggtggcacaaacgtggctcactgcaggcttgacgttctgggctcaagtgatcctcccatcttggcctcccgagtagctgggaccacaggtacgtgccaccacactcagctaatttttcttttccttttttttttttttgtagagacaggatcttgccgtgttgtccaggctggacttgaattcctgagctcaagcaatcctcctgccttggcctcccaaagtgctgggattacaggcatgagccactgctcctggcttgtttcaaaattaaaaagaaaaacttacatgcagtaaaattaagttttcccttttttattatatgtgctgccaaagttagtgctaaaatttccccttttgagtgtacagttctgtgagtttggggaaatatatacagttgtgtaacccccaccacagttgtgatatagaacataatcatcctatcctcgatggattatttgggcctgttacaaactgctggaaacatacccaggagtggagtgctgggttaccgtgtgtacatttaactttagtattttccacatagttgtccaaggtccttgcaccacgttaccttcccacccacagcgtcccagagttctagtgttccacattctcatcaaaattggtaaatgttgctgggcgcggtggctcacgcctgtaatcccagcactttgggaggccgaggcgggcagatcacttgatgccaggaattcaagaccagcctggccaacatggtgaaaccccatctctactaaaaatacaaaaattagcctgatgtggtggcgcacgcctgtagtcctagctactcaggaggctgaggctcaagaatcccttgaacccaggaggggaagtttgcagtgagccgagattgctccactgcactccagcctgggcgacacagtgagactctgtctccaaaccaaacaaaaacaaaaacaaaaggccaggcacggtggctcacgcctgtaatcccagcactttgggaggcctaggtgggcaggtcaccaggtcaggagatcaagaccatcctggctaacacggtgaaaccccacctctactaaaaagacaaaaaaataaatagctaggcgtggtggtgggcgcctgtagtcccagctactcgggaggctgaggcaggagaatggcgtgaacccaggaggcagagcttgcagtgagccgagatcacgccactgcactctagcctgggacacagagcgagactctgtctcaaaaaaaaaaaaaaaaaaggtaaatgttaatttcactcccttaaccagaaaatgtgattgctgtatctagcaaagagatctgttagctgtcaagtgctgaacccacataccgggatgtggtggtggcaggcatttgggtgtcgcagactcagcctgttttccgactctcctatgttgaaagatgaggctatattagtcttagtcttgatttgttctcaagtcagattcttcaaaaatcaaagcgcctctttggagttcattagctgtatgttaattgccttgagtccttctgctgacaacagcccacaaccatctagaaaacatgatttctacaaagtcttgatcctggaatggagcacacagccccttctccccaggccatgatactgctggtggtgcagaacggagtttagacaaggaggtgcatggccgagagcaatctggaaacgatcagagaggccagttgcgtaatgatggagaagccgctgttttgcagccacgaaaatcatgcctggagagagaatgttccgggatgtgaaattattcacaatctattgttcaaagaagacagttgattatgggacggaaggtaagaagcgttcccaccctccccacacaggaggagtctgtgtgggtgccaaggggcgcagcgagggttgccttggccccacccagcgcttactggcacgcagaaccctgggaggactgccaggctctgagtcagcggggcctggggcrgcaggaagggaggggcctcacgtggctgggcctcctctgcctcgtggggcctcctggctctcagccctgcaggcagtgcggctgtttgaaaggacaaatcacacatggcctggtcctcctggggcccagccaagactatgttcctgaaggatggctgaggggagggtgcctcctgggtcgggattgggagcactggggaaggaggtcatccaagcatagggcggggaggga

SEQ ID NO: 95856 - DNA, 31758 bp, Homo sapiens
aaaaaaaaaaggccgggcacagtggctcatgcctgtaatcccagcactttgggaagccaaggcaggaggatcacaaggtcaagagattgagaccatactggccaacatggtgaaaccctctctctactaaaaatataaaaattagctgagcgtggtggtgcacctgtagtcccacctactcgggagaatgaggcaggagagtcacttgaacccaagaggcagaggttgcagtgagccgagatcgtgccactgcactccagcctggagacagagagggactctgtctcaaaaaaaaaaaaaaaaagcctggtgcagtggctcacgcctgtaatcccagcgcttcgggaggctgaggtgggtggatcacctgaggtcgggagttcgagaccagcctgaccaacatagagaaaccccgtctctactaaaaatacaaaattagccgggcgtggtggcacatgcctgtaatcccagctacttgggaggctgaggcagcagaattgcttgaacccaggaggtggaggttgtggtgagccaagatgatgccactgcactccagcctaggcaacaagagtgaaactccgtttcaaaaaaaaaaaaaaaaaaacaaaacagaaattctgataaactgtcatgacacagaagagcctaaggagacatgaccactaaatgtaacatggcatcctagatgggaccctggaaaagaaaaaggatactgggaaaaaacaaataaaatatgaataatggggtcaggtgtggtggctcacacctgtaatcccagcactttgggaggccaagggaagagaattgcttgagtctaggaattcaaaagcagcctgggaaacacggtgaaacccaatctctaccaaaaaaaaaaaaaaaaaaaaaattagccaggcatggtggtgcacacctatagtcccagctactcgcagggacggggaactgaagtgggaggattgcttgaggctgggaggcagaggttgcagtgagccaagatcgtgccattgcactccagcctgggcaacggagcaagaccctgtcttaatcaatcaataaagaaaaatctgaataatgttagagtttagttaacaataatgtgtcaatattagttgtgaggaaggtattaaagtgaggtaggacgttaaggataagggaaactggttacaggggagaagagccaggatatttaaggtacattaagcgggaccaatattcagaaaggaaaaaaccctctctgctaatgcctcccccatgctgtattctggcttatcagccacagcacccacatccaggcttcctgccatccaggatcctgggacaacaggtcagtcagaggtcacaggtcttcccagctagggcagccctggctctaaccctatgtaccccacatctttatggtgttctctttttgggaaacctggttctcagaacaaagaaagcatctggcaaacaaatgttcattagtcactactgcagtggaccccattccctgagcaccttctgtatgccaggccctcgatgtaagaaccatctcttacaatgatcttcctcagcctcaaggccttcaggatccagacccccatcacctctctgccatcttctcctcctctcctggctttctctgcccagctatcctcctcgcctcgcgttcctcacatgctccccgaaagttcaatagtcacgtgcacaaaaatccccactccaggctctgcttttcagcagtggcttttctaggctgtggtggagcctagggaccaaataaaccaggacctgcccttgtgccaggtctatggcccaccttctaggttggaggtgccagggagctgcataagaagcaaggctgccttgcctggtcaagrgtcagaggtcagggtaggggctggcctcaccttctgctcctcctccaggmgaagccgctcctcctccttcttccactcagcttcgcgctgggactygagtcgtttccgctcctcacgttcagcctcctctgcctggagagaggtcttcataggggcacatccctcacccccggctagagtgtgcccaccgcccagacagactagggaaggcaatgcctgggccagggcacagacccaggcggcaggagacagagccagggaagcagcaaacaccagcccagcaggcaacaagccctcagtctgccttagggaaaaaggaaggcagtgccctttcgcacttcccagagctgcaccccmtccctccggcttgcctcacgctgggcctttcgcgcttgtttctcctccagcttccgcagtttcttagctccaattttccccgacaggtgagtttccgctggcttctcgacaccttcctcctcctgggctgggtatggtcaaagaaagacagttcaggttctgaccagagaggactgatgacgatggatccccaacccctcgtccctcccctaacagggggatccccttccacccacctgcaaatgtcactagcccagctctgccctccagaggcatctgccatgagtgcgtgtgtgtgtgtgcatgaatatgtagggatgggagaacggtgaggggcccatagggcaagggaaaagatgagaactttaggccgggcacggtggctgaagcctgtaatcccagcactttgggaggccgaggtgggtggatcacaaggtcaggagattgagaccatcctggcaatcatggtgaaaccccatctctactaaaagtacaaaaaagggctgggcacggtggctcatgcctgtaatcccagaactttgggaggcaaaggtgggcggatcacgaggtcaggagatcgagatcatcctggctaacatggtgaaacctcatctctactaaaaatacaaaaaattagctgggtgtggtggcgggcacctgtagtcccagctactcaggaggctgaggcaggagaataatgtgaacccaggagccggaacttgcagtgagctgagatcacgccactgcactccaacctgggcgacagagtgagacactgtctcaggggaaaaaaaaatacaaaaataattagccgggcatggtggcgggtgcctgtagtcccagctactcgggaggctgaggcaggggaatggtgtgaacccaggaggcggaacttgcagtgagcggagatcgcgccactgcactccatccagcctgggcgacagagcgagactctgtctcaaaaaaaaaaaaaaaaaaaaaattagccaggtgtggtggtggccacccgtagccccagctactagggacgctgaagcaggagaatggcatgaacccagcaggcagagcttgccgagatctgctgccaagtggtgtgagccgagatcacgccactgcactccagcctgagtgacagagcaagactctgtctcaaaaaaaaaaaaaaaaagatgagaactttagatattgcatagccacaaagaaggaggtatcagattaaaatatgcaagtgtctcggggtcacagatagcgctgcctggatatttaaggtactgtggctgataagccagaatacagcataggggaggcattaggagagagggttgttttttttggtttttttttttttgagacggagtctcgctctgttgcccagggtggagtgcagtggcgcgatctcggctcgctgcaagcaccacctcctgggttcacgccattctcctgcctcagccttccgagtagctggaactacaggcgccagccaccatgcccccctaatttttttatttttatttttagtagagaccgggtttcaccatgttagccaggatggtctcaatctcctgacctcgtgatccacccgcctcggcctcccaaagtgctgggattacaggcgtgagccaccatgcccagcccagagagggttttttttgtttgtttatttgtttttggagacggagtctcgctctgtcgcccaggctggagtgcagtggcgcgatctcggctcactgcaagctccacctcccgggttcatggcattctcctgcctcagcctcccaagtagctggaactacaggcacataccatcacgcccggctaattttttgtattgttagccaggatggtctcgatctcctgacctcgtgatccaccctccttggcctcccaaagtgctggaattacaggtgtgagccaccacgcccggcccagagagggttttttacctttctgaatgctggtctcacctaatgtaccttaaatatcctggctaatgaactccagagttctctggcttctgtctctggtgccaaacccccaggcaagggaagtcccatgaggaaatttatcccgcctcaaatctgaaatcctcctcacaatcgtcaggagttgctgaggattctgggcttagtccctggccaggattatccctttgcccatcaaaccctggctgaaatgacagtcccaacactatgactacctcagggccagctgcaagttaaagacccactgatgcctgtgcagcaagggtctctgaacccaagtctgagccagaaggtacggcaaagaaagggcctcttcttgagctaaagggataatccccaaaggtacaaggcaaaagcctcaaatgcccccagtttctgagaaacgcccagacgccccctcctcaggctyaagccagctgccaagtactggagaagacaatcctgagggctctcctggtctcctggaagcagggatatggaggcctctgtgtcaacagaatgtctctatctttaaactgttttcctggggttgtgggtgaccccactccaggaactgcagaaactcttggccaggcactctgcctctagggtgaaatcctcagggaataagtgtgcccataacaggaagggtgcgaggatagaaggggtgaattgaggaacattctgaatcaaactgaagacccttgccctctgcttggacactgagagccaagatgaaggtagggggggttgacccagtggaacaaatgccaggtcccaagtccccccctactctaccgtgtggctcccagacgtccctcctaccctgaggcttcataccctactcccccacttagctttgggggcccttttatccccccctccaacccaaaccctctccccaccaggctgggcccctctcacctaggatgacagcttcctcctcrttctcatctgcttctgcccaggccacccgctgggctcgacgctgggcctgtaggcggctgcccaggtccctccggcgccgaggcctgcctccagctctcggctcctcaggctccaggggcccaggctgggccacccggcctgctcctgccagctcctcattgtgcagtggctcttggccggctgtagggaagacagaaatgacaatgctgcctataagcccagcccggcccatggcaggaggagcggcagccyggaagcctcacctcctctgcttagcggcctgctgcccacagcacaaggccccgacttctcagtctgactggcaaggccttttccaccaggcccacagcttggtcccaggcgggggctcagcccttccctcgggcctgtgtgaatactcctctcccctcccggctccacctttccagctggcctgtcaggaggcccctatcctgatgtccccagctctcatcgagtaccccctgcaggaatccactgatttctcgcctaacaccacctgtggttttatctggctccccagccagagagtacacttcccggcggtggccgagcctcccccgggaagacctgctggatctccgccttccctcagcgtgtcccttccgctcctgggagcgcgcaggtgctcagaggtagcttgtgggcccagggagcaggaaaacacatatacaaacccgcccgctgaccagaaatggggggaaagagggaggatgggtgtatctgttctgtgccctggccaatgacatggccttctgatcggggagcggattggggagggagagtgggccctctccttggcgggaagggagagagcttcaggaatttcctggagccgcctcgcgcttctccagctcgtgggggacaggcagaaaatattcagatgcccccttcctggcacctgctctggagccaggctgggaggaatggaaaacccctgcggcctccctaacaggtgcagagggaaagggccccgacggtgacggatgggagtgtgcgccggccagggcctcaggcctttggaggtatggagttcccgggggtgaagagagggatgaggccagactctggcttggagtcgagagaaaggggtagcggcgcggccaccgattccaggtagggcactgcggaagccccacccggcacacgactagcgcacggacgcgcatgcgtcccgcccgcccaggtgcgcacgcgcaggagccgcggcgcgacggtccacwaaggctcagaaggccagaaaacccggtaccaccaaccctggtgcagcggcwtctcctacctgatgccgcccggccccggctgcgagtcaggaagaggataaagccgactagcagagccgccgctaccaagtaccacacaggcgccaccatgacgagggcctcagtgcagaaccactgcgtccaccctgargccgggatctcataggccccgcccctatttcccaatctagactccgcccactactcggagccccgcccagcggcacatcacagagaggctttaatgtcagacattaaaatgagtttggggggtgtaaagaaacccacaatgttaagaggaaattatagcagacggtatgtccagtagaaaacatctatgtatgttttttttttttgagacggagtctctgtcgcacaggctggagtgcggtggtgcgatctcggctcactgcaacctccacctcccaggttcaagcgattctcctgcctcagactcccgagtagctgggattacaggcgcccgccaccacgcccggctaatttttgtatttttagtagagatgggggtttcaccgtgttggccaggctggtctcgaactcctgaccttgtgatccacccaccttggcctcccaaagtgctggrattacaggcgtgagccaccgcgcccggactatatatgttttaaaaatcactaaacaatcccacatagtgtttatggaaacaaccgtggaaaaagtacgaaaagaggcttgggactgatgcacaccaacttcaggatagcgattacctctaggaggagggaagcgggttggggttttgctatatctgtgacactgaatttctttctttctttctttcttttgaggggaaggggaggggaggggagggcagtactggaatttattaagctttttgtatacatgataacagaagtaaagatttatttcaggagccaggcacagaggctcgtctgttaacccaatactttgggaagtctaggtagaggtgagcctaggagttcaagaccagcctgggcaacatgatgaaaccctgtctctacaaaatacaaaaattagccaggtgtggtggcatgcacctgtgattccaggtacttgggaggatgaggtgggaagatcacctgagcccagggaggtcgaggctgcagtgagccatgatcatgccagtgcactccagcctgggtgatagagtgagaccctgtctcagaaaataaaaataaataaaaataaattcaggaccaatgaacaatggtgagaaagggatttgaaaaaatacgggccagatgaggtggctctcccctgtaatcctagcactttgggaggccgaggtgggcggatcacttcaggtcaagtgttcaaaaccagcctagctgacgtgatgaaatcctgtctctactaaaaatacaaacaatgagtggggcgtggtggcacatgcctgtaatcccagctactcgggaggctgaggcaggagaatcacttgaacccagggggcggacgttgcagtgagccaagattgcaccactgcacaccagcctgagcgacagagcaagactctgtctcaaaaaaaaaaaaaaaagaaagaaagaaagaaaaagaaaaagaaaaaatatgggctgggcgaggtggctcacacctgtaatcccagcactttgggaggctgaggtgggtggatcacctgaactcaggagtttgagaccagcctgacaaacacagtgaaaccctgtctctactaaaaatacaaaattagcttggcgtggtggtgggtgcctgtaatcccagctacttgggaggctgaggcaggagaatctctcgaagccgggaggcagaggttgcagtgagccgagatcacactattgcactccagcctgggcaacagagtgagactcagtctcaaaaaaaaaaaaaaaaaaaaaaaagctgggcaccgtggctcacgcctacaatcccaaccaacactttgggaggtcgaggtgggtggatcacctgaggtcgggaatttgagaccagcctgaccaacatggagaaaccccatctctactaaaaatacaaaattagccgggtgtggtggctcatgcccataatcccagcacttcgggaggctgaggcaggcggatcacgaggtcaggagatcaaaaccatcctggctaacacggtgaaaccccgtctctactaaaaatacaaaaaaattagccaggcgtggtggtgggcgcctgtagtcccagctacttgggaggctgaggcaggagaatggtggggacccgggaggcggagcttgcagtgagctgagatcgcgccactgcactccagcctgggcgacagagtgagactgtctcaaaaaaaaaaaaaaaagaagaagaaagatacaaaaattaaccaggcatggtggtgcatgcctggagtcccagctactcaggaggctgaggtgggagaactgctcgaacccaatatgcagaggttgcagtgagccgggaccacaccactgtacttcagcctgggcaacagagcaagactccatctcaaaaaaaataaataaataaaagaatgaaaaagaaagttatctatggacttgtaattatagatgtcagttgtgatctttttgtttgttggttttttgagacagggtctcactcacatcacccaggctagagtacagtggcactcttggctcactgcagcctcgacttcccaggctcaggtgatcctcccacctcagcctcctaaacagctgtgactacaggtgtgtgcccccaagcccaactaattttttgtattttttgtagagactgggtttcaccatgttgtctaggcttgtcttgaactcctgggatcaagtgatccactgtgcccaagctagttatcttacattacagaacacctactatgtaccaggagctgggatttaagaatgagaggtgaggctgggcaccgtggctcaagcctgtaatctcagcactttgggaggctgaggtggagggatctcctgaggtcaggagtttgagaccagcctggtcaatatggtgaaaccccacctctactaaaagtacaaaaattcactgggtgtggtggtgcatgtctgtaatcccagctactcaggaggctgaggcaggagaatcccttgaacccgggagtcggaggttgaagtgagccgagatcgtgccactgcactcaagcctgggcgacaagagcaagactccatctcaaaacaacaacaacaacaacaacaaaacacagtggctgatgcctgtaatcccagcacttagggaggccgaggtgggcatatcacgacgtcaggagttcgagaccagcctggccaacatggtgaaaccccgtctctactaaaaatgcagaaattagctgggcgtcgtggggggtgcttgtartcccagctactcaggaggctgaggcaggagaatcgcttcaacccaggagacagaggttgcagtgagccaagatcatgccattgcactccaggccaggtgactagagcaagactccgtctcaaaaaaaaaaaaaaaaaagaaaaagagaggtgagcaaaaacagatatggtttttaccattaggatttttagaagagaaaacagaatcacacaaatgaatatctatttgcagtgcagaggtcagtgctatgcaagcagatgaaagggagctcagggaaggttttcctgagctggggcttgagctggctaagatccaagaaaggcatccatgtaaggtgggctgtttttcttcttttcaggctcctcggggtaactgatgtcccccaagccctcctctgcccccaaatccccatggccactcctctagggactctgcataatggttagtgtttctacttcaataaaagaaaacaggtcaccacccamagcagtggttcccacacattttttttctttttcagaygcagttttgctcttgttgcccaggctggagtccgatggcacgatctcygctcactgcaacccccacctcccgarttcaggcgattctcctgaatcctgaattctctgaactgggattacaggcatgcaccaccatgcccagctaattttgtactttttggtagagayggggtttctccatgttggtcaggctggtttcaaactcctgacctcgggtgatccactcgcctcagcctcccaaagtgctgggattacaggcgtgagccaccgggctttcccacactttgatgagcatcagaatggcctgaggagcttggtaagaactcagactccctccctttcttgtccatgggcagaagtggccattcaagaggtactgacacaggggtccaggcggggggcagagggctgagtctctggaggagggaggtcagatgacttgctgcaaagagagtatcagcagaggttcagcagacccacctttgagagggcacttcctactttctgttgtgtttggaatgcaaagatctggctgaaacggtggccacggagaaggggtgatagatttgagaggctggagggatgaggaagtgaggaactctacatactgagctctcaagcctaggagtgaaaacgggtgagaagtttgggcttgttttaggctatgccgagtttaagttcacagtcgagtggatcatagctggcgggtaaggctgaaggtgagatcaggatgagggtttggaagcccttgcctagaaggaggcagttttttgagacagcataggagagcgcaaacctccagggtcacagggctgcagtcttctcctttcggagaccccattgcagagaagagcgaaagcaggggcggggtgggggtgggagtggtctcttccggttcttgaagatagcgtcccttaggcaggaggggtgggtcactcartctccaggctcgggaggcccccagcaaatcggacgctgtgggctaggccgccaccgsgagcccactcgcccgatacgcgccttggggtccgggtcggctttcyccgggacccctggccggaaactgagccgttcacttccgccaccagccggaagttttctgtcactggacgccaaggagttttcggtggctcagctgggtaaccggggatcaccatggcggcctcattggtggggaagaagatcgtgtttgtaacggggaacgccaagaagctggaggaggtgccgggagggtgttgggggctaactgggaggcggctgggaatagggcggagaaggggcttccgggaggagggaagcacgtgggaggaggcatggagagagaacagaattcagcccggaagaatgggtcctgacccggctgtgtggaaaagctggggcgcaagaagggagtggctgcagaatcggggcgccccggggttggcgagggaacgagggtctcgacagatcccgacacagggcttgtgtggtcagcgactgcgggacccggaggagtagcggggctcttaacaaccgccccgaaggtcacctattgaagtagaccccaacccagtgtcccgacactcttctgggacttatccacatcccgctgctgggccagggctagcaggacccagagagggcgtgggacggagttccacactgagcagtccgtgcctcaccaccgtcctgaaatgttctaacctcttttcgcgtgtgtgaaatggggatgatgcaggacatttgcttcacagcgctatagagaggaggagtaaaggaggcagtggatctaaagtttctgtttgcagggactttgtggctagcaagtaacagaaacacacagggagctcatgtaagccaccagatgactcctgtgggaatatagtgttatcgtgtcccacaggacctgaagttctctcaagaagctgacttgtccttgttctctctggatgctgatccctattcctgttcatatctttcccctttcttccctgctgggggatggaacaatgaggcttctaccagatatcagctccgactggctttrcttgaatcaagagtttgcccctgttcaatcagccatagccatggagtgggggtcatgtgtgggggatcaggatgacacccactggatatgtctgaggcagaccagtggggtgtaatcactagggacacctacatttgcctgtagtgtagggagggactgatgtcactttggtgccaggactgagtggccttctcaggaaccagagccttttgccgaaaaaaggtttgggatcctgaggccagaccagtcaggcagtccaccctgaacagagcccatgcaggacagtgggcatgagaccccaaacctctggctgagaatattgccctcacttaaagaaggagctggaacccgagtgcagtgcctcacgcctgtaatcccagcactttgggaggctgrggtgggcagaacatctgaggtcaggagttcaagaccagcctggccaacatcatgaaacttcatctctactaaaaatacaaaaattaactgggcatggtgacacgtgcctgtagtcccagctactcgggaggctgagacaggagaatcgcttgaacctaggaagcggaggttacagtgagctgagatgacgccactgtactccagcctgggtaagagttgagtgacagagtgagactctgtctcaaataaaaaaaaaaaaagaagaagaagaagaagaaggcactagagtagccaagggagactccttggagaacatggacttgaacacttggcctagaacaggtagtctttttttttttttctttgagacagagtctcactctgtcgcccaggctggagtgcagtggtgcgatctctgctgactgcaacctccgcctcctgggttcaagcaattctcctgcctcagcctcccgagtatctgggattgcaggcatgtatcaccacgcctggttaatttttgtatttttagtagaaacgggatttcgtcatgttggccagactggtctctaacccctgacctcaagtgatccaccctccacccatttcggcctttcaaagtgctagaattacaggcatgaaccacctagcccagctgtgtttttgttttgttttgttttgtttgtttgtttgtttgtttgtttagacaaagtctcactctgttgcccaggctggagtgcagtggcacgatctcagctcactgcaacctccgcctcctgggttcaagcaatcctcatgcctcagccttcctggtagctgggactacaggtgtgtgccaccacacctagctaatttttgtatttttagtggagatggggtttctccatgttggtcaggctggtctcgaactcccgacctcaggtgatccgcccgccagggcctcccgaagtgttagattacatgcgtgagccaccgtgcctggccgaacgggtagtcttaactagtggtatgccattggcagactgaggaaacctatggaatctttctcaggaaaatagtttcaaatgtacaaaataaaatacatggtattataggctgggcactgtggttcatacctgtaatcccagcactttgggagactgaggctcaaggaggatctcttgagccgaggagttcaagaccagcctgggcaacaaagtgagaccctagctctacaaataattagcctaagcatggtacctgggccacctgtggttctaggtacatgggaggaggatctcttgggcccaggaggttgaggctctagtgagctgtgtttgtgccactgtactccagcctgggtgacagagagagagaccctctctcaaaaaaaaataaaatacataggattacaaaggaagtcaactaaagtgaagtacaattatcaaaatgttacaaatatttgtgatttagttatatatactttattaatgcattaaaggattcaatctaccaatgtatgagtaattatcttaatttttttttttttttgagacggagtctcactctgtcgcctaaggctggagtgcaatggtgcaatcttggctcactgtagcctcaaccttctgtgctcaagcaatcctcctgccccagcctcttgagtagctggaacttcaggcacatgccactatgcccagctaatttttgtattttttgtaaagatggggttttgccatgttgctcaagctagtctcaaacttctgggctcaagcaatctgcccaccttggcctccaaaagtgctaagattacaggcgtgagccacaggacccagccccttaattttaaaatatcaagataaatgatattttgagatatctgcagcaattgtaatgagttataacaacatctgtgattttagtagggttaaaagtcacaggcactgctagtaatattttggtttgttacctatattcataattgaaaaagttactacatttcaattaagggttactaagaataaagttttttttcccaatccatgttcataggcctyctgaattctgggtatcttctgwtagagaattcctggtctaggaggatggctagggtttctgggagcattgagaagagaagagtgtgttctggatgggggcttagcacaagcagagacctgacgtagaagagatagagaagcaaggagatggaaggggctggcttgctggggtgggaccctgaaagccggggtgaggcccacaggcctgagttggtaagctttaggagatgggcagcagagttatcgatgagaaaggcggatgacagctcacgtgctcacatggagaatcactagatggtgataagtgttctcttttctcttggaacaggtcgttcagattctaggagataagtttmcatgcactttggtggcacagaaaattgaccgtatgtctctgttttgttttatttttaaaagatggttggatttctctgtcttcctgtgacctgactttctgtgtgtctgtttccctgataagtgccggagtaccarggggagccggatgagatttccatacagaaatgtcaggaggcagttcgccaggtgcttgccctgcccttgtcccacacttgctcttcttgtccaggtagcttccagggcctgcgcctgctagaaacaatagagtagacacagtttgttgagctttctaggaccggcccagagtcctctagggttcagttaatattggctttggaacactgccttcctttgccagccttgaatacatggtatctcccccagaccaccaccrtacactcccacgtacacacagactccccttcccccaaatgctcagacaatggattccagccctacatcctccccacacacatccaccgctgcattcacacatgttcgtggaactgagaaagcacgctgcggagagtcaggctgagtgtgaatcccagctctcccattgctgtgcctggagcaagctttaacaatcggccaaagcttggtgtcctcataagataagagattggccaaagttaagagattggccgagggcagctcccatggtgctgtctgccacagatctcagctagctgagggctggccccagcctgggtgacgcgggtgacctggacgttccaggtggggatggtgatcatgggtctcagggctgtatgtctttgtgctgcaggtacaggggcccgtgctggttgaggacacttgtctgtgcttcaatgcccttggagggctccccggcccctacatgtgagtgactacctccacccccttacagggcgtcaggcccaaaaccaccagaactgcaaaatgatgaggtacctgatactgcaggtcattccctgtcttarcatcaacagcctttcacgttgtcccgaggaaagacgggataggagaagcatgcctttcttttgtaaagtgtgagaatgcgacctgtaagtggagatggtaaaggggaccccacgcatttgagaagtacattcataggtagattaatttcaggaaagagaaaacaaggaagttggaatctaaaacttgatttctttcttcctttctttttttttttttttttttgatacagtctctctctgttacccagacggctggagtgcagtggcatgatcatagctcactgcagtctccacctgccaggctcaggtgatcttcccacctcagcctcctgggtaactgggactacaggtgtgcgtcaccacacccagctaattttttgtatttatttatttatttttaattttttaattattttattttattttattttattttgagacaagagtctcgctctgtcgcccaggctggagtgcagtggcgcratctccgctcactgcaagctctgcctcccgggttcacgccattctcctgtctcagcctcccgagtagctgggactacaggcgcccaccaccacacctggctaattttttgtatttttagtagagacggggtttcaccatgttagccaggatcgtctccatctcctgacctcgtgatctgcccttcttggcctcccaaagtgctgggattagaggcatgagccaccgcgcccggcctgtatttatttatttttggtgtgtgagacagggtctcagtctgtcgctgaggtaggagtgcagtggtgtgatcacagctcactccctgggctcaagctatccrcctgcctcagcctcccaagtagctgggactgcaggcacatgcctagccagtttttttgcattttttgtagagataggattttgctacgttgtccaagcttttctcaaactcctgagctcaagcgatccgcctgccttagcctcccaaagtgctgggattataggcgggacccacctcgcctggctcttggaggcattctttttcatttccccttggctgtcaatagggaacagcctggaaaaggtggtaagaagatccagctgctcctggtgtctgactgtcctttckttctcttgcagaaagtggtttctggrgaagttaaagcctgaaggtattatctgctttgtttcttccctggatctgttgggaatgagaatctgggctttgtctaggggagggaccccaactagtaatcaggagtcccaggttctagcccccaccatggagcctccacctcattttccccatctagcacctgcagctcgtaccctgtactccagagagcactgtgtgggggagggatgatgggagctgcagggttgaggaacaaaggggctgtacttaattctgggtttcaagaggaacttggcccttgtgactgccttagccagggcctgccctgggarttggaggactgcccctcctggaccccagcagtgcatatcctgtcacccacagttgcaagccaaaatgtcccctctttatgtgcttttatttatttagagacagggtctcactctgttgcccaggctggagtacaccggtgtgatctcgactcactgcaacctctgcctcttgggttcaagcgattctcctgccttagccttccaagtagctgggattacaggcgcccaccaccacgccctgctaatttttgtatttttagtagagagggggtttcaccatgttggccaggccagtctcgaacacctgacctcaagtgatccgcctaccttggcctcccagagtgctgggattacagatgtgagtcacaacacccagcctatttgtttacttatttatatttttgagatggagtctcactgtcgcccaggctggggtgcagtgcgtcaatctcggctcactgcaacctctgcctccctggttcaagcgatcctcctgcctcagcctcccaagcaactgggattacaggcatgcgccagcacgctggctaagttttttttttttttttttttgagacaaagtcttgctctgtcgcccaggctggagtgcagtggcatgatctcggctcactccaacctccacttcccggattcaagcgattctcctgcctcagcctcctgagtagctgggactacaggcacgtgccaccatgcccagctaatttttgtatttttagtagcgttgggatttcaccatgtaggccaggatggtctcaatcttctgacctcgtgatctgcctgcctcggcctcccaaagtgctgggattacaggtgtgagttaccatgcctggccttttttttttttttgtgacaagtttcactcttgttgcccaggctggagcgcaatggcacgatctcggctcactacaacctccgcctcccgggttcaagtgattctcctgcctcagcctccctagtagctgggattacaggcacctgccaccatgaccagctaattttttgtattttttgtagaggggtttcactatattggccaggctggtctcgaactcctgacctcaggcgatccacccatygcagcctcccaaagtgctgggtttacaggcgtgatccactgagcccggcttaatttttgtatttttagtagacacggagtttcgccatgttggccaggctagtttcaaacacctgacctcaggtggtcccacctcggcctcccaaagtgctgggattacgggcaygagccaccactcccagcctattttatttttttgagacagaacctcactccatcgcccaggctagagtgcagtggtgtgatcttggctcactgcaacctctgcctcctgagttcaagtgattctcctgcctcagcctcccaagtagctgggattacaggtgcccaccaccacgcctagctaatttttgtatttttagtagagacagggtttcaccacgttggccatgctgatctcgaattcctaacctcaggtgatccacccacctcggccttccaaaatgctgagattacaggcatgagttaccgcacccatccttatgtgcttttaaaaacactttacattatagagcatttcaaacctgcatagtagaatatcataataggataatgggcataaatatatacagttattatttgtcaattaaaaaaagcatagtagaataatgaacctcagttgccatcaaccagcttccagggttatcagcacgaggcctattttgtgacatctgtaaccccccttatttttcctcagtccagtattttaaggcaaatcacagacatcatatcatcagtaagttcttcagcttgtatttatttttatttttatttgttttaattttttttggagacaagggtctccctgtgttgcccaggctggagtgcagtggctcaatctcggctcactgcccaccatcagggctcaagccatcctcccaccttagcctcctgaggagctgggactacaggtgtaagccaccatgcctagctaatttttgtgttttttgtagaggtgaggtcttgctatgttgctggggctgatatcaaactcctgagctcaagcaacccacccgccttggcctcccaaagtgttgggattacaggtatgagccaccgagtgcagccactgtatttctaaaaggtgaaaaatttwaaaactgttaaacaagtaaactataatcattttaaaatactacataatcattttttggatttccttggttgtagaaaaagtgcctattacagttggttagtttttgtgggtttttttttgtttttkttttttcttycctgagatggagtctcgctctgtcgcccaggctggagtgcagtggcccgatctcggctcactgcaagctccgcctcccttgttcacaccattctcctgcctcagcctcccgagcagctggagctacaggcatcagccaccacgcccggctaatttttttgtatttttagtagagacggggtttcaccgtgttagccaggatggtctcgatctcctgacctcataatctgcccgacccggcctcccaaagtgctgggattactggcatgagccaccacgcccggcctacagttggttagttttgaatcaggaaatcaaacaaggtccacactgcattggctagttttctgactttaaataaagccttgtatcgtcagcctgtgccagagggaagcgagaatgcccagagacttccatttcaagcctagtcccactgccttgggctctgccgcccccgctaccccaattgagacctaatttccccttttagggaattcctccctccccacccttagtgggcgtcttgggagtgggggtgggagttggccattagggatgcactgagccctcactgcccacccgcaggtctccaccagctcctggccgggttcgaggacaagtcagcctatgcgctctgcacgtttgcactcagcaccggggacccaagccagcccgtgcgcctgttcaggggccggacctcggtgcgtacccaccttgatgcagttcccgccgcgcgccgccagggggtgccgcgacccgagccgaccgccccgagtctgcgggagggtggtgggargggcgccttggggccagagatatctgtgccttgctgagaggctcccctgcgcagcataggtagaagtgctgtsgatcctaggagggtggtggaaagggttccctggggccagagtagttgcctacgccttgctgaggggtgcccctgggcaggacaatggaagtgttgtcaattctgaaacctgtttgacccctgaggctgttgtttcagggaaacagttggctaacagctcctgaggcctgatagacccagaagtgcaaactgaaggtgacaattcccaaagctatttttttctgtttattttatttatttatttattttttgttagtragaaaccacacttggatcaaagctacatctatagcccagacttctctaacctcagatttccttatccaactgccaaggtgcttgactatctctcagcctttccagcttttcatgtttatgtataatagaatcttaattcttttttttttttttttttttttttttgagacaaagtcttgctgtgttgcccaggctggagtgcagtggtgtcgtctcggctcactgcaacctccgcctccagggttcaagcatagaatgttaattcttggccaggtttggtgatttacacctgtaatcctagcactttgcgaggccccagcgggaggctttcttgagcccargtgttcaagatcagcctggacaccataacaagaccccatctttgcaaaaaattttaaaatgaggccgggcgtgatggctcacatctgtaatcccagcactttgggaggctgaggcgggcggatcacctgaggtcaggagttcaagaacagcctggataacacagcaaaaccccgtctcaactaaaaatacaaaaaatatctgggcatggtggcaggcacctgtaatcccagctactggggaggctgaggcaggagaatcacttgaacccaggaggcggaggttgcagtgagctgagatctcgccactgcactccagcctgggcaacaagagtgagactccgtctccaaaaaaaaaaaaaaaagaggctgagcacagaggctcacacatgtaatcccagcactttgtgaagcaaaggcaggaggattgcttgaggccaggagtttgagaccagcctgggtaacatagccagaccctgtctcaaaaataaataaatagccggacatggtggtgcacacctgtagtcctagctacttgggaggctgaggtgggaggatcacctgagcctcggagtttgacgggacagtgagctatgatcgcactcctgcactccagccatggagtgacggagtgagacccagtctcaaaaaaaaaaaaaaaaaaacaaaccttaattatttgcccaaacttattccttccgtgagatgtattcaacaccccctactgcctatcactgctcacgacagcctccacctcccaggctcaggtgatctcccaccctggagagtaactgggactacaggcgtgcaccaccacacccggctaatttttgtatttttggtagagacagggtttcactatgttgcccaggctggtcttgaactcccgaccttaagtgatccgctggcctcattctcccaaagtgcaacctccatctcctgggttcaagcaattctcctgcctcagcctgccgagtagctgggattataggcgtgagcaaaaaacatttgttgcgtggttgaggttcagtaactggccttagtcacgcagctcctcacggcagaagcagaatttgcctttgggtctaaattacttggcatctatgtgactaatcccaatcatgtaccacctccgttgtattttttaaagagtaaaaaaaaatgtttttgagacagggtcttgctttgtcacccaggctggagtgtagtggcatgactaccgttcatagcagccttgatctctcaggctcaagtcatcctcccacctcagccttccgagtagctaggacctcaggtgtgagctaccacatctggctaattaaaaaaaaaaaaaaattggtagagatagagtctgactgtgttgcccagactggtctcgaactcctgggtttaaaccatcctccctcctcggcctccccaagcgctgagattacaggcgtgagctaccacacctggtcccttgtatttttttcagttagaatcttttgggtttttttgtttgttttttggagtgtttgtttgtttgtttggagtgtttgtctctgtctgtcgcccggactggatcacagctcactgcagcctcgacctcttgggctcaagcagtcttcccaccaggtagctgggactacaggcttacaccaccaggctaggctaatttttgtattttttgtagagatggggtttcgcctttgccaygtggctcaggctggtctcaatttcctgggctcaagtgatcttcccacctcagcctcccaaagtcctgggattacaggcatgagccaccgcgcctggccagattttctttttcttttctttyttttttttttttactttgataacaacatgacatttcatgtcactggattacaatttgttctttttctaacattttcactgtggaatttccctactacagccagtaygtattgtactcactaatgtgttcatgaagtggggagttgggtacctgcttcctgttgcggtgtttcatcttattgttaaagtcttccttgtattttcaggaaygctgtcatagtagccggcatctggcttgtccacggagttcagggtacttagcttcctatcaggagaaaacgttttctgtctatctttctttctgtctatctttcaaagtagcctcattgttcttcagtgatgtcccaatttgtcccgggtgtggcggagggcgcgtggccccggaggtgctggtggtcctgtgggtccatgcctcctccctgtgtgtgagggaagagctgccccgctctgctttttattgtattcagcaaacatttgcaggtgctgtaggggccttgcaactacattttgcgtaagttgggtcaaatcaaattcacagactcaccaaactcatactggccactgccctcctcgtgcttgtcctctggacccagttacacacctgtcccccctttcctgtggcagggccggatcgtggcacccagaggctgccaggactttggctgggacccctgctttcagcctgatggatatgagcagacgtaaggagccctgcttttcttccctggggtgtggggttggtacagccatggtttgggttgggccagtgccccrcccaagtgcaggcatgcggatatgggcaggggaggctcccagggtgctgttccagccacaggcagctctgctggggtggacactaggaatctgggtggcccagtccatggttggggaggcagccagawggcactgagagtcctgggctctaaggctccaggtcaccccacatcagctgtgtagccagtggtttcgcctttctggccttggcttgtaagctgtacatctgacttttttttttttttttttgagatggagtttcactcttgttgcccaggctggagtgcaacggcgtgatctcaactcactgcaccctctgcctcccaggttcaagcaattctcctgtctcagctgagattacaggcacgcaccaccgtgctcagctaatttttgttatttttgttagagacggggtttcaccatgttggccaggctggtctcaaactgacctcaggtgatccgcccacctcggcctcccaaagtgctgggattacaggcgtgagccaccgcgcctggccacatctgacagttttatggcatcattttctgacccccatctaggttgggaaaatgtccaggcttttgcagcctctggtgggcactattttatgccctccaagtaccagttgttctctgtagttcgcacaaatcgccccttgttcacacaaggcacgggccattgttggaatcaggctttccaagctggaggggcccttagggagcgcagtgtgaggccccacaatagccccagcaggggtgaggacattgtggaaccagccactagccatatggggctgtggagcacttgcgtgtggtgagacccagaaacggaatatttctgttcagcgttaattcatttaaatagccacacctggctagtggctactggccgccgtcttgcacagagcagtctgcaggccacgggcggggtatgggattctcacctcactgcggtgctggcatggaggtcgggcccctggccagctgttcaagtgctcccccgccctcagcgcatgagaggagactgctgtgtttgctctgtcaggccccactgcttcctgtcaacagatgacaaagctgatcaaacatgcagctcatccccccctgtccccagcttcccttaatgacttttgggcacactagagcaagtttaatacccctccatgctcattcatgggggtttctgcctacaggggaattgaaaactttatccgatttttaaaaattcactggctgccaggagctgctgggccccactcccctttccttggggtctgtgagctttggtctccagggatgagatgaggtagggtwgggagggggtgcacttccttcctgaatctgggctccctgagctgctactgtcacccctcaggtacgcagagatgcctaaggcggagaagaacgctgtctcccatcgcttccgggccctgctggagctgcaggartactttggcagtttggcagcttgacttctgcagctggaggagscccctcaggccggggatctgsggagggctagcccaaaacctcccgcatygggcaggcaccccctgaagtacttccttcagggtttcccctttgtgagggtgtcragtagcctcaccggcctgtctggaggagcagctggctctgctctgagaaactctggcaagtggacgccattctcttgcccttaggattcactgctctctcctacagccgccaggcctggggtcctgaaaggaccttgggtggtaaagctgtacttggtgggagtgagggcgtggggaggaaccatgcaaatcgccttccatggtttttaaatgcagtaaataacatttytggatgagacttgtttccaaaataaaccagctatatctgttttgaaccctgccccaggcaggtgtctgtctcagtctcctttggcaggtgcaggaagttttttgggtgggggtggggatggggacacgggcagcaccgtgtggaaggcattcggatgccactgtgagctggagtgttacgtctccactcgagttcttgcctcattcaatggcatggattgcgggctgacctccaccctggatccatgctgccccccacccgcaggtagtgccagggcctccatgaagccttgctgggttgggggctgggtagtgtggcacgcccagtgcttttgccttatgctgttacacatcagagccgcgaaaatgttggtttacaattacaatggccagttcatttttatggtggggaggggctggagtcctcgaccccactcggcgtgatcgccacagttcagcctgcgggctgcaggcccctcgggaggccctgcttatgccacacgcccttactctgtgccctggcgaagccattccctggaagggacytcyccaggtggctccgttgtcagagtgctcaaccccaaggatattcaaggggggcgtgatgggctcaggctggtggggcacccccaggcttgcttctgtgcccacaggcagctctggagaggcccctgccgtccctgtgactccatccagcaggacggccctgggtgaggacagagtgtcattccttcactcccctcttgcctgcaagccccggctgggttaaatccccaggaggtgctgcgtccctgcccagcctcctgagcctccttgtgggtgggagatgtctggctgggcctcagacatggggtgctgggggcctgcctgctccttgccagttgatcatggatgtagcccccctgtgcagggaacacccaggctactgatgggggactccaaagaagaatcacatgctgcctgggtggggtgggtacataggcttggggcagggcacctctctgtgtttcctgttcagctcctccagaattttgtcctgggtgcacacaacactttctggccattttttttactttagctacctgtgatactgtgaagtatatatctggttccaggcaaggtggctcacacctgtaatcccagcactttggaaggccaaggtgggaggatcgcttgagcccaggacttcataaccagcctgtgcaacatggcaaaaccttgtctctgcaaaaatacaaatatttgctgggcatggtggtgcgtgcctgtggacacagctactcaggattccgaggtgggaggatcccgagcctagggaaatggaggctgcagtgagccgtgattgcgccactgcactccagcctgggcaacagtgtgagaccctgtctcattaaaaaaaacmtgtgtatttggtctttgacccctttcctagcaaacaactttaaaatcctcagaaactccacactgatgtctttttgtgtgctaatgaggtggctggcagcatctaggtagcttggttatggaaagaccaagacaggactagaggactgggactttcggtctccaccccccgccacacctccagggaggggcagggctgaaggttcagttgataaccagtggccagtggtttattcaatcatgcctgcataatgagacctccataaaaacccaaaaggccagggtttggggagcttctgaatagccgaccatgtgggggttcctggagggtgacaccccggggagggcacacaagctctgtgccccttcccccacacctcgccccgtgcatctcttcatctgaattctccgtaatagcctttttagtaagccagtagggtggggctgaggccctgggcccattcagctcttattcatcactgggaactccatcaatgcccaacccttaaaaaataaaaaaataaaaaatttaggctgggcttggtggctcatgcctgtaatcccagcactttgggaggccaaggcaggcagatcacttgaggtcaggagttcaagaccagcctggccaacatggtgaaaccccgtctctactaaaaatacaaaaattagccaggcatagtggcaggcacctataatcccagctatttgggaggctggggcatgagaatcgcttgagcccaggaggcggaggttgcagtgagccgagatcacgsccttgcacactgagagtgagacgctgtctcaacaacaacaaaattattaaaacctgctaaatataagtaaatgtttccctgacttgtgaaccactctagcaaattaattgaacctaaaagaggagtcgtgggaaccccaagttgaagacagtgtgtcaagttctgcaggcccagacctcagactggtgggaagttaggggtggtctcgtgggactgagccctcaacttggggtttctgaagctacctcctggcaggcagcagttaggttgaattgaattgaattggtgggcacccagcagctgtcccgtgacaaatccctcgcgtggtcacagaagtcttctgggttgactgttgtgcacagtgagagcggaggaaaacgttttgagttggtttctccacactcgctacccgtccccagacagcagggtggagagcatgctcatacccacctggattggttctcggggccctgggggctcctgatctcccactcagcaccaggctacccagtgtaaggtggcgtctcatgtgggcttacgtttctctaattaccaaggggtctgagcacctctcgctactcctgttacggttgggcctccttcttcccctgttcacggcctctgcctcttctgttggggctgctgtcctttgctggtttgcaggaattctttgcatatttcagatatattttcagttttagatgcagccaatctcttctgtcggccaacttagtccatggggcatgtgtcaagccagtccaggaggtgatgtgagccccaggtgttcctgctgaccactgatgctgcgcacccggcactcccctgagcctcagagccatattccctgttgtcggctgccattgggagaccctgacccaccaacaaatgagcaagccagaaacactgcaccttctccctccgtcaaaccattcccaccccgtgtcctgccgtcggcagtcctcccacctccctccatcgccaccagtgctgcccctgccctgtaaaatccaggatccgcacaacagatgggatggttcacaagtgctccacacgaagcctcggcctcccggcaggcagctttcatctgagagtcacagggccctttgctgtcaccctgatggtccctcccgccccactgctcttcaccagccacagcgcctcagtggccccaagccctcgctcctctggacccttgcacatgctgttcccagaacgctttccctgcaggtccctggagaaatggccatgcgaaggcctcctggatcttccatgtttcactgttgggccagcacccactgtgcgacgttggaggtgacagaccacaggtggcactccacaaactctgtcccttgcattccacttccccagggagggcttcccctccccagagtgggggtggagtggcagtagcagggacacaggtggcacataggagcctagaaacaggagctttattctctaatgtgcgtccagcaagttccttacacaatcaaggaaatggtttctctttcaggcatcgactcttttatcaaaagaaaatccatcctgctcagtcccacccaccctgggcagaagctgccctgagcaacgctcttggcctaaagctaaaggataatgggagaggggtgggcacataccactgcacccctacaatgcccagatgccccaggcctgagtcagccatgagaaggcgcagcacagagcagtcacccacacacctacacctcccctcacagctccagagccagcctgggaggacgtggagggctggcgaatggggcgtgggcagggtctgccagtcaaggcctgtgctcagcgtccatgacatccaagtacttggcttcaatgattcggggcagcaggatatagctgtggggagggagggacaggaggatgagcctgggtcagagagaaggcagtggacacccatcccagcccaccccagcccacccacagggccaggctaggcctctcctccccgcccgcctacccccagcccacccactctccactcctagactggagcccctcctgcccaccacccaccccagcccgcccactctccacctctaggctgggctcctcctgcccgccagcctccccagcccgcccactctccacccctaggcaggacccctcctcctgggcacccaccccaacccgcccattctccgcccctaggtgggacccctcctcccagccgctgccccagcccgcccattctccacacctagactgggcccctcctgcccactgcccacccgcctgtaccggatggggatcatggcgatcatgatgaggggaaagatcatcttcatgtagggcagggagctyatgccgaaggcacacagcagcagcagctgaagcacctgcaggcccgtgaagtagtggatcttcctctggggcaccctccggatgtagtgtgtcggggggtacgcmgtctgtgggcrgcagggaccgggtgtgggcaggcatggggctgtgtccccacccacgccactccctcgcagggccaagcgctcacctgctccttgagcagcagggccacgcgctggacgagctggttgccatcgagggaggtgagcgcgatgtagaggaagaggccatagagcacgggcttggggatccactgaagcgggaccggcagcagcaacagggacaggcccaccaggacgctggcgcccagcgaggtcagccgcgtctccttcacgttcacaatcctgcggtggcccgagccgcgagtgtcacctctgcgcccctgtccacagggcctcactcctccctatgtcccatgtggccagaggctccccactcctcagggtccacggctcttgccagcctcacactcacgtgtcatagatgtgtccgttctccacacgctcctccactaaggccagggctcgcacgtgcagcggggagtgggggtaggcggcatggatccaaggcagcccaaacagagacagccctgtgttgatgatggcgaggagcaggaggtcccagtggtaggcagtgcccttcaccagcctgcagcagacgggcactcgtggacagagccccacagcagaggcccgggccccgcccaccccaccctcacccaccctccacacctgttctccggtgcattcaccaaggcggccaccaagttctgctcgatgaagaagagcatggacagcaggaagccgaggcccatggcaccgctgacggccctcagggacagcgactggatctgcgccatcgcaaaggggctctcgctggggttgtagcggaacttgctcactgcagtaggggacaggctactgctatgcctgcagcgcctggggagctaccccacgtcacccaccgcccggccccaactcactctcgatttcccggaagccatgggagctgatgagggagaaggcgagcaccgcgatgggcagggcgcagtcggacaggatctctcgcacgcaggggtgcaggtaggggctggggacagcaggtgcatgagcacagcctttgacccatgcggcccctcccctccccatgcagcccctcacctcttcttgaattggtagagggtgtagcccagccagagcgtgcccagcatgatgaggaggctgagcacggcggtcgcctggcctgagtgtgtggccgagggcagctccgtggggctggcgaggaagctggcrttgagggcagtgtggaggctggcgttgaggctggcgccgaggcctgacaggctgacaagggatgaagtcctttttgtgtgatagtcgtccaagtaatgcccatagtagtacttccagaagactgtggacacacacccacaggcctcagccctctccagcgtgtggcagggggaggccctggagggaggggatctcagggagaaagggctccay

SEQ ID NO: 95857 - DNA, 58414 bp, Homo sapiens
tactacacttaagcatgttttagagtgaacagacatatattaaatcataacaattaagtatcttgattttcaatcacagttaacagcatggattaattctgagtagagcaagcagctctaatgagttttcaccctgaagctacacatctttaaacttggtaattgtaatgaaggcacataatgaggttttttaaaatctaaatagcacactgatacttattactgatcttttatttttgctaataaaatgttttagatgtcctaaaaactattttgagaaggatgccacagaagtttctcaaaaaacctaggatgaaaatatttcataaaagaattaacatcgccacaaaaaattcaacaggattcttctaggataccaatctcacaagttagaactagttttcataggataattacagacaaagattatgaattattcatctttgtattgcctataatccctccagtttaggaggctcttgatatatatttgttgaatgagtgaatgaatgaattattgagtgagtgaatgattaatgggccaaatgcattgtttcaggctttattatatgtggttcttatacttcaggagatgtgatttgacccatgagataactgacttgatacaattaatgagtcatttcataacaaggttctactggtattgtactcataaatgaaaccatgctaatgactcagaaagattcatctcaactaagagatccctctgtgcaagttaaatttgtcagtttcttcccagtatctaaaatggattgtattcttctttcaaaagaacaaaatcagccgatctaacttccacctaatttataagttgtgtgtatagttatagacatagatcgcataaaatatacatttatctttatatagagagataacactactggtggcgattgttatctgagtgaacaggtgtggctgaaaaaacctttgcctgaccaactgttctttccacactatacacatataaagagtattctatggttggcagctgtagccatatttgcagatcccacagctatttgtaactgcactatttaaaataatactctacccattaccattattcataaatagctatacttctaactaatgcaagtaaacctgttctgcctattttcacttggaattccggaattacactgaatcatatgaagtttcactttgtgagctctttatagtttttcttctgctcactatttttgcttgccatcctttacttagcacacaactttatgagtatcctattgtcatacattctctacacctgcccagtctcaaagccacatgcttcagtaagaaaatacacacactagctaatttaggccctcactgtctgacttacctatttaaagttaaatatcactcacaaggggatgtaatagaacttttcaagaaataatttgttcatatatttactggctatttattgaagcaccaggcactgttctaggtgctgggaatatagcaatatgcacagtcactgccacaatggaactttgttgtatgcatgtttctttttccacttcagagcagggatagcatctcttccttaatatcacctagaccactgttttgcacctagtaagtgtttaacaaatgctgacagacaggtcagcactccggaaaccctcagtttatgctggacttctgattgagtccattcccactcctgcttgctggatctcttggatctccacatgacctacataacaaaaatcatgattgctttcagctctctattgccaatcaaaataactggctacattgctttctttctgcaagctggaatatgattttgctctacctagacttatgacagtcctgtggtcccatgtttattctgccaagcttttaatatgtttcattagcatctttcctgagtgccctaaatgtattctaggagtgcaggtacaggatcacagcatggattttaggaggcttgtctgtggcatgacacactgcctcgtgctcgctctctccatgtgcttttcaaacaccaatattcatcagcacaccacatcagctagaggcaagacaccaaaaaagatgagtagtaaacacagttgttcatttgcctactttctgggaatgaacatcaagcatcaagcatcttagagatttgttggtcagttggttattcccaagactatattttaggaatcccaaagagagctactgatagattcctaccacaaaagttctttgacagattctacctaatcaacttcatatttcttgctcagtataaattctcccacaaaaggtcttcctggttttataaatttggattcaaaaaggttaaatattatattatccaagttttatttccccttagatttttataaataccacataattgccagccttcaccctgtgtataatctaagacaaagttgaaagagagggggagaaaactctaaaatgtatttataagcaatacatatacttctggagaactaggaactgggattgtgtaaattgctttgcatcatggtctggacagcagattatacatgcatatatttgttaaaaattacctaagtataatttctatccctcaaggctcaaaccatagaacaataaaaactaagtgcttatttcatgcctcctaggttcacagcagtatgctaattcctgtgaaaagaaaagtcactccccttgccaaggatccctaaaacttttatgaagcaataagaccaaataataaaatgaaaatatgaaagggccaataataaaatgttatcttatactagtttagcaaaatcacaaatatcatttaaaagccagtcaatggctaattgaatggcaacactaattagtgctgaagaaacccagagacaaaagtattccgagaagtccaggtgcttcactcaaaagcaagtactctcagaaaatggatcagaagtacacagttggacccaggctcaaggccttgtagttgggcgtggcaggaattagcttgaaagtgatggcttgtcagggatggatagacatttgtcacacttccttggctgtccaggagctttctaatccttcctatgttggagaattgttgcctccccaaagcagaagctaaaaaattgctttcccagcttctcttggaactcatgacctgggactctccaatgcactgacatgagacatgagttcagaagtagatgaggtgaatgagaaagtgcagtgttgagttgatgccagcaagggcagcaaggacagtcagtgccagaggctgccgtgacagtagtccgagctctagtatcctctgaaaacttctcagcctctatatttggcagcaagctgtctagtacagtagtgccacactggaatttgaagattgttcctagctgtaagtaagcaagtttaattctgtggttactgtagagactttattattttaaacataatttttagagatagggtctcattctgtcaccaggctggagtgcagtgttgtgaccatagctgactgcagcctcaactcctggattacaggcatgtgccacacctggctatttttttttttttagattgttttttggagacagggtctccctatgttgcacaggctggttgtgaacttcttttttttctttttttgagatggagtttcactcttgtagcccaggctggagtgcagtggcgcaatctcggctcactgcaacctccgctgcccaggttcaagcaattctactgcctcagcctccagagtaggtgggactacaggcgtgcgccaccatgcctggctaatttttgtatttttagtagcgacagggtttcaccatgttgcccaagatattcttgaactcctgaccttgtgatccgcccacccttggcctcccaaagtgctgggattacaggtgtgagccaccaagcccagccgtgaacttcttatctcaaaagatcctcctacctccacctcccacattactgggatgtaagcacaatccatcacacgtggcggcagagattttatgatgtacccactatctaaaaaatgtcttactctgtttaaaatagtaaagttggattctgttgtttgcaactaaaaaccttaacaaagaccagattgactacagcaaaatgtgcatcttgaatcattatttgcctaggaagaaaaaaagaaaaaaaaagtatattagtaaaaatactaagtccagaagaagttctggaaaattagggagaaagcaagtggccaaaggatagaaagagtgcatgatacatttaatatgatggcataacatgcaaacagcattaatgctggatgtttgacagaggcgtgcagctctgtcggctgcactcctcctcttcctctatactctgcgctctgtgaggctgaactctgacctctgcatcattgggctcacctgctttctgcatttcagctgagttctgccaatgcagagcactataaggcaagagtatgagatcagagtccattcttttgacttcctccctgcaaggtttcgcagactgatgtttatcctgaccaaaggtcccagctcctgccaggcaggcttttctcaccacattctttctttaagtaccttttcttactcttgagacatagggatggtgatgaaattcctaagccactagttctggagtctaaccttatcctttggtgtttccacacctttaccacacctttgcaaatagtatgtttataaacacttctccatttacccagttgagtgtgtcatcactttcctgttgggaccccaactactaaactattatagattatttggaagtacatgtcttataaaactatgaaaacctgcagggaaaagatgaacacaacattgagaaaagtgcttaaccctaggggatagaaagagaaggcgagtaattagattagagaatggtaaacaagagacacagcaggcagtaactatctatgtaatatatatcatataaacatttattcttacattgggtcatagaaacataaatattttctacaccattcttcatgatttttatgttacagtccacagctttacatttttttcactctattaaggctatcttttagtgaataaaagtcctaaatttaatgtagtccaatttatcaatctatatgcttaagattagagctttttatgtcctatttaagaaatctttgcctgtttaagaatatcttagtcattaaaatattctgcatgttattttctagatgtttatcaggtcatctttctcatttaggcccacaatctattttgaatttattttttgtatggtgatatgatttgtatgcttaacatactgtgagattcttgtgactaacattgtattaggattttgcctttatgttcatgagtaagattagcctgttgatccttttttaaataaggggctggtaattggctattagtgctattagtaatatttcctccttaaatatttagagcattcagtggacctagatgtttctttccaaggaggttttaaatgagagattcaatttcttaaatataactattctattcagactttattttcttgcaccagttttcataaattgtggttgtttatttcatctgaattttcaaatttattgtcataaaattttatctgcagtatccacacagatgcaaaagaacatttttatcttctgaagcagaacacttggcatctccgtgacagataacttcactatcactcagaaccaccccaagattaaatatcagccttatatttgtataacttaagaaagcaaagatctgttccaaagtgaatgtctgtctccactagaagctaaaagctcctagtaactttacaataaaactcactcatgggaaacacaacttacacttcacctagcactaattacacaagtgataaacatacaggcagcaactgggaaactctagagtgcaactctgacatcaaatcagagcaagagatttagatttttcagttaccagattggaaatagtagataaagccataagaaagagctcatatttcagaaaaacatggagagtgaaaagcaccaagttaaagagggaggaaagtggaaaaaacttgcaacaaaaataaaatatgaaaggcgaaaagtagggggtagaactagagtgatggcatcagacatgtcaaaggggagtttgaagagggaagagttggtcagccatgcccawttcgaatagcggttttggggaatgagtactgattaagatcattggctttaacawttaagaccattggctttaacatttaagacagaagtttcagtaaagtaggagatgttaatgaggaagtaagtagttagaaaatgtgggtactgggctgtttctactgatctcaaaggaacgcccatactgaatagctgtggtaccaagtagtcaagagatgttgaaatgtctctgtgtgaaaaaagggaaagttttaaactgtagccttaccaatcaagatgtgaaaaggataaacaattcaagcagtttcaggtgagccaggcctaacacccaaaggtcacagacattacaatctgaacaacaaccccgtcttccttcaacctgatatttaaagtcccacaaggctttacattttttaaaaaagcactgcttttcttctggctctttgtatcacttaaagtgtttaccaatctctataataaaagaaaaatacaattctaagaggagtcattatactctatcattttagctacgtttacatgaaacaaagaagtaatgtgtaccctgggaaaccgagcacagtgaactcctattaccctcactctgtcattacgtgatttctgggaacaccaaagataaaagaccaccctaattccagaatctcaggtagcacttcgataagtttaaaggttctgacagtgaaattattgcccaatcctgcaccaaaaagagatttttaaaagaagactctttcttccaggaaaaagttctatgtcttggacacttgcagtatcttaaaagaaaatctttttttgttttggtataaggaaggagattggcacaaaaaaccaggtcaagccatctcttcaatgaagatatttctcaggttactacagaataaccttagtgcttcaaaggaataatcaaactatttcaatataaagagtctaattatttattttaaaaatcgttgttgacaacaccttaatttcagaaaacaaatgacttttaaccagtccagtgtctcaggatacattttagcttccccttacattccttctctagaaaagagtcttgcctttgtcctctgcagcagagatgagcaggtcttcttcccagagctcatgctgttggggaaggggtggcagagggaataggtgaggtgaatcctcacgactcttcccctgcacagatttagtaattctaggcaaccccgctccatcttagctggaatagtggaaagttttcaattgtaaaaactttttttcataccttagtcttgctaaaaatagtttcctataactgaatgaaagtataaaatgaaattatgagtaggagaggttttcctaatgcagtcatgtatcaattaaagataaggatacattcttcatccttgttaaaaacatcagagcatacttacacaaacctagatggcgtagcctactacacacctaggctacatgggatagcctattgcttttaggctacaaacctgtaaagcatgtgactgtactgaacactgtaggcaactgtaacacagttgtaaggatttgtgtatcaaaacatagaaaaggtatagtaaaaatacagtatgaagctcaggtgcagtgactcatgcctgtaatcccagcattttaggaggccaaggtaggcagactgcttgagcccatgagtttaagaccggcctgagcaacatggagaaaccccatttctacaaaatagtacaaaagttagccaggtgtggtggcacatgcctgcggtcccagctacttgggggactgcagtggggggattgtttgaacccaggaggccgaggctgcagtgggcccggattgtgccactgcactccagcctgggtgacagagtgagaccttgtctcaaaagaaaaggagggggtgggaagggtcagccacatctctggggttcagtaaactcagccattccagcctgccagctatgaagaatacaaatcgtctgaagacggaagggtctcccacaacacaccacagctgccttgccagatcatggccagactgcttctttaagaaggacctcgatccatttctcctcactgggtgggaccttcatgaagaagctttagccactctagccagggttctatggatagagctctgatctgttcctgggacagagctcctggcacagaggggagtggggggtggaagccgccatctctgcagcagttcagttgactcagcctctctagcctgctggcttggagaatagagtctggaagaggaagggtcccacttccacccccaatgcaacacacctgctataccaaaaggcagccagattgcttttttaaaagggtccctgatctcatttcccctgrctgkgtgagacctcccaaaaggggtcaccaaccacctcctacaggtgtgttcaggctagcaacaggtcagtaccctcctgggatggagcttccagtggaaggagctggctgccatctttgccatttcacggctttcactggagatacctccaggtatggaaaaaccaaggcaaccaaagcagacccccagcaaacatcagcagccctatggtagagtggcctattaaaagaaaaacaaacaaacagaaaacaacaacatcaacaaaaaacaccacacactaacctcattcaaagggcagcaacctcaaagaccaaaggtagataagcccacaaagatgagaaagaatcaatgcaaaaatgctgaaaactcaaaaagccagagtgcctcttctcctccaaaggactataacacctctccagcaagggcacagaactgagctaatgctgagatggctgaattkacaggagtaggcttcagaagatgggtaatattgaacttcactgagctaaaggagcatgttgtaacccaatgcaaagaagctaagaatcatgataaaacaatacaggagctgacagacagactatccagtttagagaggaacacaaccgacctgatggagctgaaaaacacaacatgagaacttcacaatgcaatcacaagtatcaattgcagaatagactaagtggaggaatgaatctcagagactgaagactatctttctgaaataagacaggcagacaagaatagagaaaaagaattaaaaagaatgaacaaaacctctgagaaatatgggattatgtaaaaagactgaacctatgactgattggagtacctgaaagagacagggagaatggaaacaagtcggaaaatatactttgggatatcatccaggagaacttctccaacctagcaagacaggcaaacattcagattcaggaaatgcagagaagcccagtaagatactccatgagaagatcagccccaagacacataatcatcagattctccaaggctgaaatgaaagaaaaaatgttaagggcacaaagagagaaaggccaggtcacctacaaagggaaatccatcagactaacagcagacctctccgtggaaacgctgcaagccagaagagattgggagccaatattcaacattcttaaaggcaataattttcaacccagaatttcatatctggccaaactaagcttcataagtgaaggaggaataagatcctttttaaacaagcaaatgcttagggaaatcattaccaccaggcctgccttgcaagagctcctgaatgaagcattaaatatggaaaggaaaacccattaccagccactacagaaacacactgaagtacacagaccagtgacactgtgaagcaaccacataaacaagtctgcaaaataaccagctggcatcatgatgacagggccaacttcacacataacaatacaaaccttaaatgtaaatgggctaaatcctctaactaaaagacacagaatggcaagctggatgaagagacaagacccgttggtatgctgtcttcaagagacctatctcatgtgcaaagacacacataggctcaaaataaagggatggaggaaaatttaccaagcaaatggaaagcaaaaaaaaagcagaggtcacaatcctagtttctgacaaaacagactttaaaccaacaaagaccaaaaaagacaaagaagggcattacataaaggtaaaggattcaattcaataagaagagctaactatcctaaatatatatgcaccaaataaataatgaaatactttatattagagtaaatttatttcaccaaataaataatgaaagtatttcatattgggtaaataatgaaattaaggcagaaatcaagaagttctttgaaactaatgagaacaaagagacaacttaccagaatccctatgatgcagctaaagcggtgttaagagggcaatgtatagtaccaaatgcccacgtcaaaaagctagaaagatctcaagttaacgagctaacatcttaactaaaagaactagagaaccaagagcaaataaacctcaaaactggaagaagacaagaaataacgaagatcagagctgaacttaaagagatagagaagttaaaaagtcttcaaaaaaatcaacaaatctgggagctggttgtttgaaaaaattaataaaatagatagactgctagcttgactaacaaagaagaaagagagaagagtcaaataaacacaatcaaaaatgataagggagatatcaccactgaccccacagaaatacaaacaaacatcagataatactataaattcctctatgcacataaactagaaaatctagaagaaatggataaattcctggacacatacaacctcccaagactgaaccaggaagaaattgaatccctgaatagaccagtaatgagttctaaaattgaggcagtaataaacagcataccaaccaaaaaaaaagcccaggaccagatggactcacagctgaattctaccagaggtacaaagaaaagctggtacaatttccactgaaactattttaagaacttgaaaaggagggactcctccctaactcattctatgaggacagaatcatcctgataccaaaacttggcagagatacaacaaaaaagaaaacttcaggccaatatctttgattgatgatgaacatcaacgcaaaaatcctcaatgaaagtactttattgccagtaggcaaaccaaatccagcagcacatcaaaaagcttaaccaccacgatcaagttggcttcatccctgagatgcaaggttggttcaacatatgcaaaacaataaatgtgattcatcacataaacagaactaaaggcaaaaaccacgtgattatctcaatagatgcacaaaaggccttcaataaaattcaacatcacttcatgttaaaaactcaatgaactggatattgaaggaacatacctcaaaataataagagccatatatgacaaacccacagccaatactgtactgaatgggaaaaagcatgaagcatatcccttgaaaaccagcacaagacaaggataccctctctcaccactcctcttcaacatagtactggaagttctggccagggcaatcagccaggagaaagaaataaagcatattcaaataggaagagacgaagtcaaactatcttwgtttgcagatgacatgatcctatatctagaaaatcccattgtctcagctcaaaagcttcttaagctgataagcaacttcagcaaattctcaggatataaaatcgatgtgcaaaaattgttagcattcctatcaccaacaacaggcaagcagagagccaaatcatgaacgaactcccattcacaattgctacaaacagaataaaatacctaggaatacagttaacaaggtaagtgaaggacaaggtaagttcaaggagaactacaaactgctgctcaaagaaatcagagaggacacaaacaaatggagaaacatcccatgctcatagacaggaagaatcaatatcgtgaaaatggccatactgcccaaagtaatttatagattcaatgctattcccattaaattactgttgacattcttcaaagaattagaaaaagtattttaaaattcatatggaaccaaatagaagccgcaatagctaagacaatcttaagcaaaaggctggaggcatcatgccacctgacttcaaactataccacagggctgcagtaaccaaaacagcatggtactggcacaaaaacagacacatagaccaatggaatagaatagagaactccgaaataagaccacatgccgacaaccatctgatctttgacaaacctgacaaaaacaagcaatgggaaaaggactccccatttaataaatggtgctgggagagctggctcaccaaatgcagaaaattgaagctgcaccccttccttatgccttatacaaaaattaactcaagatggattaaagacttaaatgtaaaactcaaaactatagaaactgtattagaaaatctaggcaatgccattcaggacataagcacaagcaagatttcatgatgaaaatgcgaaaaacagttgcaacaaaagcaaaaattgacagattgactctaactaaactaaagagcttctgcacagcaaatgaaactatcaccagagtgaacagacaacctacagaatgggagaaaatttttgcagtctatccatctgacaaaggtctaatatccagaatctacaaggaacttaaacaaacaagaaaaaaacaaacaaccccattaaaatgtgagcaaaggacatgaacagacacttcttaaaagaagatatacacacaaccaacaaacatatgaaaaaaagctcaacatcactgatcattagagaaatgcaaatcaaaaccacattgagataccatctcacgtcagtcagaatggctactattaaaaagtcaacaacagatgctggtgaggttgtggagaaaaaggaatgcttttacactgctggtgggagtgtgaattagttcaaccattgtggaaaacagtgtgatttctcaaagacctagaggcagaaataccacttgacccagcaatcccattactggttatatacccaaaggattataaatcattctattataaagatacatgctattttcattgcatgaatatgttcattacagcactattcacgatagcaaagacatggaatcaacctaaatgcctgtcaatgattgactggataaagaaaatgtgatacatatacaccatggaatactatgcagccataaaaaggaatgagatcgtgttctttccagggacatgcatggactggaagtcattatcctcagcaaactaacacaggaacagaaaaccaaacaccacatgttctcacttataagtgggagctaaatgacaaaaacacatagacatatgcgggcaaacaacacacagtgggacctttcagaggaggggttgtggggaggaagagcatcaggaagaacagctaatggatgctgggcttaatacctaggtgataggatgatctgtgcagcaaaccaccatggcacacatttacttatgtaacaaacctgcacatcctgcacatgtaccccaaacttaaaagttgaaggacaaaaaaacctccaaacctatttcttaaaaaaagagaaagaaaaaaatacaggatgaaagatttttaaatggtatgcctgtataggtcacttattatgaatggagcttgcatgactggaagttgccctgggtgagtcagtgagtgaatgtgaaggcctaagacattacaccactgtagactttataaaccctgtacacttaggctacagtaaaattattttttaatgttctttcttcaacaataaaattaactttagcttactgcaactcttctactttataaactaattttttaacttttaactctcataaaaacacttggcttaaaatacaaacacattgggccgggcacagtggctcatgcttgtaatcccagcactttgggaggccaaggcgggcagatcatgaggtcaggagttcaagaccagcctgaccaacatggtgaaaccccatctctactaaaatacaaaagattagctgggcatggtggcaggcacctgtaatccctgctactcgggaagctgaggcaggagaatcgattgaacccgggaggtggaggttgcagtcagccaagaccacaccactacactccagcctgggcaacagagcgaaattccatctcaaacaacaacaacaacaacaacaacaaacacaaacacattgtacagctatacaaaaatattttctttctttttatccttattctatagacttttttctattaatttttcatttcactttttaaactttttgttaaaaaactaagatataaacacacacatgtctagcctgtacagggtcaggatcatgaatatcactgtcttccacctgcacaacttgtcccactgtaaggtctatgggggcaatagcacgcatggagctgtcatctcctatgataacaatgccttcttctggaatgtctcctgaagggtctccctgaagctgtcttacagttaacttttttatatataagtagaatgaggatactctaaaataaaaataaaaagcatagtaaatacataaaccagtactatggttgtttattattatcaagaattatctactgtacataattgtatgtgctagacttttatatgactgacagcatggtaggtttgtttacaccagtatcactacacacgagtaaggtgttgcatgatgacattatgacagctatgacatcactaggcaatagaaatttaccactccattgtaatcttatgggaccactgttatatatgccatccatagttgactgaaatgttactatgtggcatataactgtactattttttggcattttctgaacaacacaaatcaacagtcttgggccatatgagttacatcgtcaatgttgtaacactgtagagttggaagggactctaaaaatattctggttcaaacccctcatctgatgagaaaaagccaggagatgtgtgattacgtacacaaggtcacatagttaatggaggattaagtactaaaactctggttattatgttctaccacgccaaacttttcttgcaacaatacacaactaatttattttcccttcgttcttccttttctttctttttcttgtcttttattctcctttcatttattatcttttctttccaaatttccttccttctttccttctgttttctctctctctctgcctctctctttctctctctttctttctttatctttttttctgtgccaactttactgggttaagggataactagatagctggtaaaacattgtttatgtgtgtatctgtgaggatgtttccagaataaatgagactttgagtcagtagaccaagtgaagaagattgccctcaccaatatgggtgagcatgatccagtcttttgaggagagccagatagaagcagaaggtagagaaatggcaaattcactctctcttctggagctgggatgtccattttctcctgccctccgacatgagaactccaagttatttagccttcagactccaagacttacaccattggctcacctggttctcagaccttcagactcagactgaattataccaccagctttccaggttctccagcttgcagacagtcaattatgggacctctggcctccataatcctgtgagccaatttctataataaaccccctcttatgtatctctctatatatcctattggttctgtttctctggaaaactctaatatttttctttcttttttaaaaatggaataaaatttgaaaccaaagattaaaaatattgcatactttaacctactacactgtctacccctccaggcaccattaagaaaccttcaatagtttctttgaactgaaacttgtcatacaggttctcagcctggaaacaacctcattatttgtggagcggctttaaaaaaataatttgaaaataattccttatatattttacttcactttgcataactcagtgtatctccatactatccattttaacactggtttcttataaagccatttaaaatgcatccactgaaacagtgagtaaaattttatcatgcaggtcaacaaaatttggcatgggtttcatgcatccagatttattttagcatgttagatataattttaacttggcctttaccctaatagagttttaaagttaaaaaaacataaacttgaacactaatctacttttatgagtaactgtaatccaaataattaagtgtcatgcatacagaggtcacttactttatcaacaatagaaacaacactagaactcaagtctactgaatggaaatccagttcaattatttattccaccacatcatattgaccctccctccaaaagaaagtttacagatcaacacagaactgtttgcatctttccagtcctaatgttcctaaaaaaactttcatctgtaagttttgcttcaataattattcttatttrgcratgggaagggcagaggatattttgattctgtctgcctttcttgggttccacctttctttcattgctggcccctcactacagttgccctactgaaatggtgaacaaacttccaggttcttgtcttacatcaccaaaggggggaaaaaaccagttccttgcatctgtgaaggaggtttccttcctggctggcacaagccatcaattcttaggaaaatagctgcatcaagaagtcagctatgcagttccttaaggatttgggcatggtagaaggtggcagaatgaggctgagttttcatgtttcaacctttatagagtctgtataactttactctcagagaaaaattttcacctacaatatctcctcttagtcaacgctgaagcccatcaaaataccaagaaccaaccgcctccaggtctctacatgaagacccaggacctggccaatgcccccaacgcccctgagattctcgagatcgagttcaaaaaaggggtccctgtgaagatgaccaacgttaaggatggcaccacccaccagacctccttggagctcttcgtgtacctgagtcaagtcacgggcaagcacagtgtgggccgtactgacatcgtggagaaccgctgcattagaatgaagtctcgaggtatctatgagaccccagcaggcaccatcctttaccacacctayttagatatcraggtcttcaccatggactgggaagtgcataaagtcaaacaggcctcggcttgaaatttgctgagctgatatatactggtttctagcacagccctgagtgtgaatttgcccaccactgcatcgccaagtcccaggagcgagtggaagggaaagtacaggtgtctgtcctcaagggccaggtgtacatccttagccgggagtccccactgtctctctacaacaaggagctggtgagcatgaacatgcagggtgattatgagccaattgattccaccgggttcatcaacatcaattccctcaagctgaaggaatatcatctccagagaaaggtcactgccaaatagacccctgtacaatgaggagctggggcctcctcatatttgcagatcccccaagtacaggcgctaattgttgtgagaaatttgtaagtgtgacttgctctccccagctggcagtgtagtggggctgccaggccccagctttgttccctggktcccctgaagcctgcaaatgtcatcatcaaaagtaaggatggagggcagctgcagtggggaactataaaatgacaattaaaagatgaaaacaatatatatatatatatatataattctacctctataayctctttacttcaatatttccaaagtgtcttcatcttacttgataagtacatacagcataaaatctttcatcactgttaagcactccttgacactgtcagtctctttgattaccaaaccagcttcctctcctaggccttctcccagccctttgactaatctttagcctttctttgcagtcttctcctcctctgtcaatcccttaaatatggtaccctgctcttttctcaatatccaagctcygctggccaatgcgtctattaagtcagcacctaactgatccctcacaaaattacactttagcccagatctctctcatatcctagcagataaatatctagagctgtgctgtctaatacaaaagccactagacacatatggctattcgataaatttaagttaattatacttaatataacttaaaacttaatttgaagtcctcactagccacatgtggctactggttaccatactggacagaacaaacataaaacatttccatcaatgccaaaagttctactggatagtgctgctctagaaccttctacaaacggcatcaaaataactcatttctaccttaaaatgcctcaaacttatcttatatgaatgtccaaacctgctctttcatatgcatcttctttcttgtctctactttaactctactgctactgccttagttcccataaactttgcaacagtatcctaactgatcttccttcctatagtcctgcagccccccaaaatgcacttttcaggatgcagccaagatctctttccagaatgtaagtctggctgtgttaatcccctggtaataactcttcagtggtttcccagtggctaaataaggtaaccacttaatttatcatctgaatccaggcaattttgataatttggtgttattaacaattatacagccataataggactaaattgggactctcagaggtaaacaagtctgtatggtcaccctgcatagagactaaatttcttggcatagctcatgtcctcttatacgatcgagccccatatgtgtcttcagcactatagacttgcttgccattcactgagtgtgatgtcctctttcacacttctgtgaatttgcttgttcgaatcccagtgcctggatcagctgcactctctttgtcatgcctgcaaaaatacagaattcttgaagatgtatatggctgggcgcagtggcttatgtctgtaatcccagcactttggaaggctgagacaggcggatcacaaggtcaagagatcaagaccatcctggccaacatggtgaaaccctgtctctactaaaaatacaaaaaattagctgggtgtggtggtgcgtgcctatagtcccagctactcgggaagctgaggcaggagaatcacttgaacccagaaggcggaggttgcagtgagctgagattgctccactgcactccagcctgggtgaaaaaaaaaaaaaagatgtatatataagcactacatatatactgttttattttaaaatatgtatttcctatatgtaaaataatacataattctcagagaaattaggaaaatgtagaaagttttaaagagagcaaaatcatccacctttctaccactctgagacaactacagttaacaattcattgtgtattttttctttatttatgtgtacctttgtattgttttctttccaaaatttgttttttttctattttgcaacaagcttttatcatgtgatatattatttacattttgtgtcattaaatagcctctgccattaaaactcataattactggatattaattcactgtatgaagatgtaacagtttagtcttatgttggatatttagattgcttgaaatttttaaaatttataagaaattaaatgttttctcatagcaaaagcaattcatatttattgtagacgtttggaagaaaaatccacaaagaagaaaagagacatcaccttctgaaagattacttttataatgtttgaaaaataagtctgtatgaaaatatatttttgaaattgttttaagtcattcaaaaaatattctatttctagaaatgtggaaaggcaaaatttcaagaacgcaagtattgcataaaggtacatttttatagctatgattttttttaatatttaatactgccactaagctaaattcttctaaatgtacaaggttaaatatgttgtaagaaatacttcttaagatatttagcagcattccagaaactctacccacgaacattaagatggaatgcaaactttctgaaaatttccactgcattttaatcatggatgaaacagagagaggttcatctttcaaatgttatgcaaaacttctaaccaggaaatttttgaaaatataaattatttataacaaagatgtaagacttaaccaagtgtaattgaacctgaatttgtggttctaggaaacataaatataattaatacatcacagatagagtcaccattttccttttcagcaagtgaaaggtagacctgtgaatatatgaataccagaatatgtgtgaaaacactaccataattttattacttgctgctattctcttcattttaaaatgacttcattcaatctcaattaaacttttaatatgccacatcttggcaggaacatgtcacagatttattccagtggtctctacacacttacctatgacagaaatgattttgctacctcctttcaaaaaaagagatatcaaaatatttggaatggagacatggtgactgagtaatactaaaatggtgttggattttggagaaggtagttcagaactataaaaatatcaagaattcttctctgctgcaagccctaaacatatacatagtatatgacctagaaattatgattgaaaaaacaccaccttcagarattgggcagaatttcagcaaacacaccagcatgtaaacatagcaccaaccagctgccatggacaaactaacaggcacagtagcacttggccattctgaaccgggccctgaaaaagggcatgtgacttatcattgtaggtggtgtttgggattatctgggaacatccagtgtgagagtgtcgccagtaggcagtgcacatttgtgcaggctgattatggaaatgtaaaaataccatcaaacatacctcggtctctttcgccaatgtaggaaaaaaggaaagctaagatgaatggctctaaaccaagctgaacacagagtgtgctggttatttcaagagacagagccttgtgtttactagtgaatcaagtgtggcatgaactaacaggcatgaaaataggtactaatcctaatgtcttaaaggggtgaacccaaatcagttcagatttaatctgcctcagtgttcggtttaattggtcatttccaattgccaatgtatttggtaggagaagattcaaactacagtttgctgtaagtccatgctgagattctgtatggctttcacagaacagcagagggagaggcagggatcagtgatagtaaagctgataccagttggccagactactgagataaacacacagctgtcctggaaccaacgaacagagatctcctgcagctcacgcttttcaccctgaaatgtgtaatccccccctcaactagggcataatgctaacatttttttaacctcacttataaatattcttctatgcrtaattatccacccaaatgcacttcttgttcctgtagctgtatcttatagataaaacaaatattgttatacataaaatcatgttttcctttggcttccaataggattttgtagacaagatccttaaggaacttaaactaagtctgtgaccactgcaggcaagtaaaacaagctttcatatttaataataaaactttaccagtggctgcaaaatggctgaataggaacatctctggtctgcagctcccagcaagatcaacagagaagacgggtgatttctgcatttcccactgaggtacctggctcatctcattgggactggttagacagtgaatgcagcccatggagggtgagcctaagcagggtggggcgttgcatcaccagggaaaggtaaggagtgggggaactccctcccctagccaagggaagccacgagggactctgccctaaggaacagtgcattccagccaagatactatgcttttctcatggtcttctcaacctgcagaccaggagattccctcaggtgcctacaccatcagggccctgggtttcaagcacaaaactgggtggccatttggggcagacactgagccagcggcatgagttttttttcatacccagtggcgcctggaacaccagtgagacagaaccgttcactccctggaaagggggctgaacccaggaagcacagtggtctagctcagcggatcccatgcccagggagcccagcaagctaagatccactggcttgaaattcttgctgccagcacagcagtctgaagtcaatctgggatgcttggcttgatggagggaggggcgtctgccattactgaggcttgagtaggctgttttcccctcatagtgtaaacaaagctgcaggggacattcagactaggcagagcccaccacagcccagcaaagccactagccagactgcctctctagattcttcctctctgggaagggcatctctgaaagaaaggcagcagctgcagtctggggcttatagataaaactcccatctcccaggcacagagcacctggcagaaggggcagctgtgggcacagcttcagtagacttaaacattcctgcctgccagcactgaagagagcagcagatctcccagcacagtgctaaagttctgctaagggtcagactgcctcctcaagtgactcgctgacccctgtgcctcctgacaaggagacacctcccaacaggggtcaaaagacacctcatacaggagagctttggctggaatctggcaggtgcccctctcagacgaagcttccagaggaaggagcagacagcaatctttcctgttctgcagcctctgctggtgatacccaggcaaacagggtctggagtggacgtccagcaaactcctccacacctgccgcagaaaagcctgactgttagaaggaaaactaacaaacagaaaggaatagcattacatcaacaaaaaagacatccacacaaaaaccccatccgaaggtcaccagcatcgaagaccaaaggtagataaatccacgaatatgagaagaaaccagctcaaaaaggctgataattccaaaacccagaatgcctcttctcctacaaaggatcacaattcctccagagcaagggaacaaaactggacagagaattagtttgatgaactgacagaagtaggcttcagaaggtgggtaataacaaactcctgtrtgctaaaggagcatgttctaacccaatgcaaggaagctaagaatcttgaaaaaaggttagacaaatttctaactagaataaccagtttagagaagaacataaatgacctgatggagctgaaaaacacagaatgaaaacttcatgaggcatacacaagtatcaatagctgaactgatcaagcagaagaaaggatatcagagattgaagatcaacttaatgagataaagcatgaagagaagattagagaaraaagaatgaaaaggaatgaacaaagcctccaagaaatacaggactgtgtgaaaagaccaaacctacatttgattggtgtacctgagagtgacgaggagaatggaaccaagctggaaaacatacttcaggatattatmcaggagaacatcccaacttagcaagacaggccaacattcatattcatgaaatacaaagaacaccacaaagatactcctcaagaagggcaaccccaacacataatcatcaaattcaccaaggttgaaatgaaggaaaaaatgttaaggcagccagagagaaaggtcaggttacccacaaagggacgcccatcagactaccagcagatctctctgcagaaaccctacaagccagaagagagtggggaccaatattcaacattcttaaagaaaagaattttcaactgagaatttcatatccagccaaactaagctcataagtgaaggagaaataaaatcctctacagaaaagcaaatgctgagagattttgtcaccaccaggcctgccttaccagagctcctgaaggaagcaataaatatggaaaggaaacaccagtaccagccactgcaaaaacataccaaattgtaaagaccatcaatgctatgaagaaactgcatcaactaccaggcaaaataaccagctagcatcataatgacaagatcaaattcacacataacaatattaaccttaaatgtaaacatgctaaatgccccaattaaaagacacagactggcaaattggatcaagagtcaacacccatcagtgtgctatattcaggagacccatctcacatgcaaagacatacataggctcaaaataaatggatggaggaagatttaccaagaaaatggaatgcaaaaaaacaaaaaaagcaagtgttgcaatcctagtctgataaaacagactttaaaccaacaaagaaaaaaagagacatagaagggcattacataatgttaaagggattgatgcaacaagaagagctaacaatcctaaatatatatgcaccaaatacaggagcacccagattcataaagcaagttcttagagacctacaaaaagacttagactcccacgcaataatagtgggagactttacaccccactatcaatgttagacagataaacgagacagaaaattaacaaggatattcaggacttgaactcagctctggaccaagcagacttaatagacatctacagaactttccaccccaaatcaacagagtatacattcttctcaacaccacattgcacttattctaaaattgaccacataattggaagtaaaacactcctcaataaatgcaaaagaatggaaatcataacaaacagtctctcagaccacagtgcaatcaaattagaactcaggattaagaaactcactcaaaatcacacaactacatggaaactgaacaacctgcttctgaatgactactggctaaacaatgaaattaaggcagaaataagtaagttctttgaaaccaatgagaagaaagacacaacgtaccagaatttgtgggacacagctaaagcagtgttagagggaaatttatagcactaaatgcccacaggagaaagcaggaaagatctataatcgacaccttaatatcacaattaaaagaactaaagaagcgagagtaaacaaattcaaaagctaccagaagacaagaaataactacaatcagaacagaatggaaagagatagagacacaaaaaacccttcaaaaaatcaacaaatccaggagctgttttttgaaaatgttaacaaaatagatagaccaccagccacactaattaagaaaaaaagagagaagaatcaaattgacacaataaaaatgataaaggggatatcaccactgatcccacagaaatacaaactaccatcagaaaatactataaacacctctgtgcaaataaactagaaaatctagaagaaatggttacattcctggacacgtacaccctcccaagtctaaaccaggaagaagtcgaatccctgactagaccaataacaagttctgaaattgaggcagtaattcatagcctaccaaccaaaaaagcacaggagcagatggattcacagctgatttccaccagaggtacaaagaggagttggtaccattccttctgaaattattccaagcattagaaaaagagggactcctccctaactcattttatgaggccagaatcatcttgataccaaaacctggcagagacacagcaaaaaagaaaattccaggacaatatccctgatgaacatcaatgcgaatatcctcaataaaatactggcaaactgaatccagcagcacatcaaaaagcttatccaccatgatcaagtcggcttcatccctgggatgcaaggcaggttcaacatatgcaaatgaatagacacaatccatcacataaacagaaccaacaacaaaaaccacatgattttctcaatagatgaagaaaaagccttcgataaaattcaacaccctttcatgccaaaaactctcaagaagttcggtattggtggaatgtatctcaaaataatgagagctatttatgacaaacccatagccaatatcatactgaatgggcaaaagcgggaagtattccctttgaaaactggcaccagacaaggatgccatctctcacaaggttgcctctctcagggagggaggaagtcaaattgtgtctgtttgcagatgacatgattgtatatttacaaaaccccatcgtctcagctcaaaacctccttaagctaataagcaacttcagcaaattctcaagatacaaaatcaatgtgtaaaaatcacaaccattcctatacacaaataatagaaatagagccaaatcatgagtgaactcccattcacaattgctacaaagagaataaaacacctaggaatacaaattacaagggatgtgaaggacctcttcaaggagaactayaaaccactgctaaaggaaataaaacaggacacaaacaaatggaaaaacattccatgctcatggataggaagaatcagtatcatgaaaatggccatccggaccaaagtaatttatagattcaatgctatccgcatcaagctaccattgactttcttcacagaattagaaaacaactactttaagtttcatatgcaacaaaaaaagagcctgtatagccaagacaatcttaagcaaaaagaacaaagctggaggcatcatgctacctgacttcaaactatactacacggctacagtaaccaaaacagcatgacactggtatcaaaacagatatatagaccaatgaaacagaacagaggcctcagaagtaatgccacacatttagaaacatctgatctttgacaaacctgacaaaaacaagaaatggggaaatgattccttatttaataaatggtgttgggaaaacggggtagctatatgtaggagaactgaaactggacccctgccttacaacttacacaaaaattaactcaagatggattaaagacttaaatataagacctaaaaccatagaaaccctagaagaaaacctaggcaataccattcaggccataggcatgggcaaagacttcatgaccaaaacaccaaaagcaatgagaacaaaagccaaaattgacaaatggcatctaattaaactaaaaagcttctgcacagcaaaagaaacaatcatcagagtgaacaggcaacctacagaatgggagaaaatgtttgcaatctatccatctgacaaagggctaatatccagaatctagaaaggacttaaacaaatttacaagaaaaaaacaaccccattgaaaagtgggcaaaggatgtgaacagatacttctcaaaagaacacatttatgcagccaacagacacacgaaaaaatgctcataattactggtcattagagaaatgcaaatcaaaaccatggccagttagaatggcaatcatcaaaaagtcaggaaacaacagatgctggagaggatgtggagaaatagaaacgcttttgcactgttggtgggagtgtaaattagatcaaccattgtggaagacagtatggcgattcctcaaggatctagaaccagaaataccatttgacccagcaatcccattattgggtatatacccaaaggattataaatcattctactataaagacccatgcacacatatgtttattgcagcactgttcacaatagcaaagacttggaaccaacccaaatgtccatcaaagatagactggataaagaatatgtggcacatatacaccatggaatactatgcagccataaaaaagcatgagttcatgtcctttgcagggacataaatgaagccagaaaccatcattttcagcaaactaacacaagaacagaaaaccaaacaccacatgttctcactcataggtgggagttgaacaatgagaacacatggccacacagaggggaacatcacacaccagggcctgtcatgggatagggggctaggggagggataacattaggagaaatacctaatgtagatgatgggttgatgggtgcagcaaaccaccatggcatatgtatacctatgtaacaaacctgcacgttctgcacatgtatcccagaacttaaagtataatgaaaaaaaataataaaactttaatgttgcagagggcttcaagggttttaaatcacgtttacatataattactttattttatgattgcaataacctagtacataggacaggagttattatcattattataccaatgagtaaactactctgggtttagtgatgtttcatgtgttgttcaaggacctttgactagtaagtgacctggttttctaacttacagttcagtatttgttcttctacactgtgaatttaataactgccattttttttcaaaatttcaagatatagatagatgtctctaggtaagtttctatatctatttcttatttaaatttctatatgtagtaatgtagataagatttatatggaaatctagatacagaaatctaaataaatttttatatgtgtgtgtatgtataatatttactttgaaatttagaatttcctttgaagtcagggagtagtgagaggatgacctctctgctctgcctacatggaaagcaacgcaggaggaaataactctccatcctggaaatacacaaagcatgagtcatctatttaatgtgatggcaatggtctctaccatctgaggtcacttcttgtacttggagaaagttggcagaataacttccaacccagaagtcaggaagttgggctattgaaagttttatttaaatgacctttctcttttgcaaattctgaatgtgaggcttccttccagtcctacagacctcaggctataagtaaaatatagtaaaaagaggaataaaaatatcaataagagttgagtaaataatggaaagttgataccacagtagatgatgtccaaaagacagaaagcataaaacatgaaaatgtcaagtgaaatgaaggcaagatttgtctcacatggtgtgaatttctaaaatctctcaggaataatttttattacctgccaaatcttaagaaagattgaattgtatttgtcaatgcaacatcaatcgggtcttatacttcgttgttgtatttggcacttcagtaaggtacttttgcacaattatgtcaacacactgagttagcctttgtcaagaaaggcaagcacttaaattcttgtcagcctatcatgtcattaaaaaaaggatctaagagtcaagaacaataagcaactattcttggcttcattagtgcctgtattttggtattttccttttgacactctttctcaggcacatctgggcaagtctagttacattaagcctagtttaaaggaaactgaaaattccacagtgaagttctccacttgactgacagatatttcactctcaggaagagtggaaattgagtatgattgtctttcactttgagatgcgtttgtaatacgaacaggtgcatccaagctaagttggggttartaatgaatggaagaatctgtagtgactgttrgaaccaaaattaatgtgaataaagcagagaggctgccagagagatgagatcaagtacagattaagtaccacaagtctcattagttggtacctaggacaataaatagtagatggtttaattatgttttataatgaaagaaagcatatattgaggagggactgcaayattaactattaattagatacataaatgttactcttcattagtttgcatttcttaaaatagataaacactcagagatcatgtttaattctctgctgactaataacaatgttagaaatatgaatcataaaaaagtcagttcctggaaatagcatacctttgtttctcatgcaatcagtattttaagtggcttcactacaaagatgaaaatagtcttagctatttttcgttctcagtgtaattaagtattttctgcagtcagagatcctaactccaagacaggggagttaggagatgccttttggtgagtcttcagaaagaatcttcagggactaagtctactggagaggaatgattttatcttttgaagatggggttgaaagtatgtctctataagaaatatctttgcaactattcattagagacaaaatgcaagaatgcaaatggctgcattctgttctaatttttttataattattatttttcttttcttaaagtaaactttgaggacttacaataacaggcatttatgtatttmtccttacaagagtagttaactacgtacccctgaaaagatagaagaactccatgagaataggggccctctattggttttgtttatttacgtagactcagttcttataacaatacctggaacttaataaaatctcaataagtatttgtggaataaatgagtgtacttaaactgtgtatttaaactggattcctgaatgttaacatctctacaagccctctacaccatgtgaatggtgaaagatccttcttcacaggcttttgagttagacaaggctgggttctactctaagccaatcacaatgaactgagcctcagtttcctcttacataaaatgagacttacaatgctcactttgcctggatgtacagtaatcctctccctaacccttatcagaagaaaatatattgcagcattcccaggggatgcctgaaaccatggatagactcaaaccccatatgtgctgggtttttttctctacagtagcaggcaggtggcacatacagcatggatacactggacagaggattattcacattccaggtgggagatttcatcactctactcagaatggcaagcaatttaaaacatatgaattgtttacttctggaattgaatattccatttaatattttggggcattgttgactgcaggtacccgaagccttggaaagcaaagacgcagataacgggtggactcctcatgtagattgcagaaaatgtgcacacctgaacacaaagtccaggagaatatttgatatatattataggtgcaataaattgagattatttctaccatttgttacctagaccattctactaatgtaagtttaaaataaaatgtcaacccaaaaactagtgcaacctcttataactggaaaaaattaacctagcaagaacaagcgatttgttgaaggatcaaaaagtcgtgctttccaggagagagggggtctgtatcaattcctactgaagaattcgaggtcagaattcacaggattaatcctctgtttttaattgcacattgattttggtgtaattcaatatatgttttcttaggcctcacaaagctaatatgtaatctctttttaatactaatcttaacctcttatatttttttcagctcctgtcttcaaaacaagctaaataaacttagaaaccctacatgatgaatcagttcttcaaataattataacttatattaatttagattatcacagtattagttgaactggatcaattcaactttttttgtatatttcacttcctttatttagagtttaagagctaaacaatacttagcaaaatacttcttcaccttatcaaaacactagaaaactcagtctgtgcctaaggtaaagtgtgatactgttaggtggcatcctgccactttacagaggcctcagatcacactattctttttagaaaattaaaattatgctggatggcttgaaaacatctggagaagccttcttaactcccagcactacagtttcttcctgcatctgctttcaccacacctcttaactaccttctccaccatcacttcatgccttattcctgcttttctaatcacttaaaatcctgatccaataagtatggttaggcgtctgaaccattagcgtatccatctacagtcaactgcaagatgcagcagtgagacactcagagcaatgaaaacacaggatcaagaagagcagatctccgcgttcatcacatagactcaataggacttggccagacaactgactgaagctgccttatctgtatattgagggtgttgaaaacacaggctgtagaaattcctcaaggttattcagaggtttcaagtctgtgaaaacacgctgtaactataagtgctctacaaatattggttgcttttaggattattacaagagaatctcttgccccagacttacttgctgagataaagttgcaaggcaattgataaccactaaagaggtaagctacaacatcagtaggctcaagcacattgaactaaagggtcaaaatagtttgaaatatccaagataccacaacagataaacaatactctgaactgggaactaggcacagatttttaactgaggctcgaactctcactctatacatggggaaagtcacttagcaaattagcaattaattatgtatcccattactgtactaggtatgcaactcacatacattatctctaatcttaaaatattatagcaagataggtataattatctctattttataggtgaggacatggagactttgagtggcttagagcatgactaagattatagatgtatgaaacagtagttatctttccaaagtccctcccttccctactctatcatgttactgctttctcccttagttgtctgatctgtgaattcaatggtcactccaaaggttttcttaggtcctcttcaattctaacatggtgattgactgcaggtgataagtacttggccaattagtggcctgcagatgatctactgaagtagcttgaaataaatcaaccatgtacctatgaatagattataagtgtcccaagatgttgacactcttagccttcagacttctgggtaggagcaaggggaagctggagcccctggctctgtcactatgtgtaccctattccatttactccagtttactatgcaagacaattttcagcatgttaggaccaaaagcctctgggaagttctgcaataaatgcatcacatggttatatacaacacaaaaagtgctttgtagcttgtatctgttgaatccatatcactcaggccatgttgtgactctggaaatgacttggtttccccagcaaaaacccatagcataacttatacattctccagcttgtacagttggagccacaaataaactgtagaagcagagaaattgattaagccaagaaaactaaacacaatttttggagcataacctaggtaactgtatttacctgaaagtctatttaaactaatagtcttgctacatttcaagactttattagggaaatcaggacatatgttgacctttccctgtgggccaaatcagtcttgaattctgatgcacaatatgaaattctccttaaatgatagtaatcttttctttccattgattcagtaatttttaaagcacattgcattgtagaaacatgcaaagtagttaccactaaacacatcattgacctagttgatgtttaaaaggttatcaagcacgtacatctttgaaatattaagattagagtttcctggacaaattataaagctagtacttcctcttggtttggaggtcagcttctatacttcatagctagaaactgaccttgacgctctttgtgaaacagaactgtggaagtacagtccactgtggttcctacagtaaccttctttccaggcagagccttctggggatgagaaagatgctaaagaccaaggagaatgagtcaaaaacaaagtatcctgtgggcaaaacctcacccatgcaattaactgaaccagccactccttactgggacatgtgccctaaaaacctgctcttccaagaagcgaaatactgcaaagttgctgcagctgcaccccactgcttcagtctaagaccagtagatatgctcacattgcatgcagaagaaacaagtctccactcttctctcttcagccttttgccaacctatacttgctttgggaacagtatggcttcacgtaaaaattgcagttattgaggcttgttcatatggaaagttaggataaaggtgagcatttctctaatatagaataataaaattattggttttaactttgagtcatcacattctttattaaatgcacatcattatttatggtgtactaatattatttttatttatttattttttttatttttgagacaggctgtcactctctcacccaggctggagtgcagtggtgtgatctcagctcactggagcatcgaccttgcaggctcaagcaatcctcccacagcagcctcctgagtagctgggaccacaggcacatgccaccacacctggttaatttttttttcttttagagatggggttttaccatgttgcccaggctggtctcgaactcctgagctcaagcgatccacccaccttggtatctcaaagtgctggaattacaggaatgagccaccacatccagctagtgtgctaatattaaagagtttaaatctggatgctactatctctgttggatttagaaaacaaaaccagtaatccatacacataaccacaaaacagttttctttcttcctcagaagtcaaattatcatttcattttgcttgttgtgttaaaaatgagaaagctgattggggaccaaagtttattatcctttagtacttgtgcaaattacagaatgaaaataaattaactatatagaggaataaaaagtatctctaattgtgtttattttttatgtataaatattgattttttttaatgtagactgtaagagactttcaaataagaataccagatttataaaaaccttaactagggctttctgggacagaacagaagagtttgcccaccaacagccctacaaaccagaacgtctggaggcctcagagaaagataataccacatcaaacaggtgagagaaaggattaaattttttaaaaaacatactacattagtgaggtgtttattttgttttctcttttcaaaaacaaagagatatactgggaatctgacaaactctgaggcttgcttgaattcgtccctgattgtgtaatgctatctcatgctataaccctgaatgtgtcatgctatctcacactatatccctgaaatgtcatgcaacatcatgctatatccctgaatgtgtcatgctatcttatgctatatccctgaatgtgtcatgctatctaatgctatatccttgaatgtgtcattccacatcatgctatgtccctcaaatgtgtcatgctatctcatgctatatccctgagtgtgtcatgctatcttatgctatatccctgaatgtgtcatgctatcccatgctatatccctgaatgtgtcattctacatcatgctatatccctgaatgtgtcatgctatcccatgctatatccctgaatgtgtcatgctatctcatgctatatccctgaaatgtgtcatgtaacatcatgctatatccctgaatgtgtcatgctatcccatgccacatacttgaatgtgtcattctacatcatgctatgtccgtgaaatgtcatgctgtctcatgctatatccctgaatgtgtcatgctgtcccatgctacatccctgaatgtgtcatgctatctcatgccacatacttgaatgtgtcattctacatcatgctatgtccctgaaatgtgtcatgctgtctcatgctatatccctgaatgtgtcatgtaacatcatgctatatccctgaatgtgtcatgctatcccatgccacatacttgaatgtgtcattctacatcatgctatatccctgattgtgtcatgctatctcatgctatatccctgaatgtgtcatgctgtcccatgctataaccctgaatgtgtcatgctatctcatgccatatacttgaatgtgtcattctacatcatgctatgtccctggaatgtgtcatgctgtctcatgctatatccctgaaatgcatcatgcaacatcatgctatatccctgaatgtgtcatgctatcttatgctatatccctgaatgtgtcatgctacatcatgctatatccctgattgtgtcatgctgtctcatgctatatccctgaatgtgtcatgttatctcatgccacatacttgaatgtgtcattctacatcatgctatgtccctgaaatgtgtcatgctgtctcatgctatatccctgaatgtgtcatgctacatcatgctatatccctgattgtgtcatgctatctcatgctatatccctgaatgtgtcatgctgtcccatgctataaccctgaatgtgtcatgctatctcatgccatatacttgaatgtgtcattctacatcacgctatgtccctgaaatgtgtcatgccgtctcatgctatatccctgaaatgcatcatgcaacatcatgctatatccctgaatgtgtcatgctatctcatgctatatcgctgaatgtgtcatgctatctcatactatacccctgaatgtgtcatgytatctcatactatayccctgaatgtgtcatgttatttcatgctgtatccctgaatgtgtcatgctacatcatgcttacatccttttcaacacctgttccctctgtcctaagtgctcagcatttctcctcataacaaatttagagtcatcatttaaggtccagttctgatgtaatcacctcaaggaagtcaccttaggtaatggttgagttgatccatgatagccatgaccatgacaattctagtcctcacaccatctggttaaggaagtccctattgctagacttttccttatgagcagaaaccaagttagacattgcttttcttttgccctgagtttttcttaggattaaacataatgaattaaaccacctagcacaagattatatgttttgtctatacaaaataaatgcttttggttgttattattgttattatgattaggttgcacaacccgcagagagcacagctaaaactcagccaacacagacacactggacttgtgtggcggcactcaagggtaggtcactcctatgcacccgggctcccgggttctttattccctcccttatgttccaattataccttaacacacggtggatactttgtggtgtgtgtcagagaggtggagtggtagattaatgaaggaaagttttccatgcacttagtcataacaacatagaaccacatacttttgttctactctcactgacttttggtagaatcttatgtgtgtctggtatgtaaaacttatgtttgtgtgtgtgtgtgttttaatgactaacatatgataaattgcaaatgaaattatcacattaccagcttgatctatttaaaaaatttggacactgttaatctttgttcttgtttgttcttacttgttcttaaacataggaggcaattttatatatcagatatttttacaaaaaggaaattgcataaaaagtgaccaactgggacaaataatatgtctgttcttcacaatatttaataccataggtatttggaaatgtctagatatttagaaatatctagatttttgttagcatattactgtaataaactaaaatctactcgtatatttttacacatatacaatgtatgattgtaaagtgatacaattgatttctcatgctgtaggcaaaatttagtctttattctacagtcatattagctgtatgcttttcttttctaagctgtatgtctcagagttacaatgcattaaaccaatcataaatgccaatgatgtgcaaaacagtgtgtttgatgatctcaaggaaaaaataaatccccgatttttaggaacttatagttcagtaatatatatgccttgtctttgtgtttttcttgctttcccttattttttgacagcatatgaaatttaactagcaatattagaggcctctagaatataaagcagattgactctcattctttaaagatttcaagcagaattataacgggggtgtatatgggtgtaagaaagtaacttttataattaaatatcatctccctggtaaactaacatgtattcagcacttttattttattttattttgtttattttatttttatttttctggagacagagtctcactctgtcacccaggctggagtgcagtggcaggatctcggctcactgcaacctccgcctcctgggttcaagcgattttcctgcctcagcatcctgaatagctgggattacagatgtgcaccaccatgcctggctaatttttgtatttttagtagagatggggtttcaccatgttggccaggctggtctcgaactcctgacctcaagtgatccacccacctcagcctcccaaagtgctgggattacaggcgtgagcccaacacgtttattttaacaaaggttaccatgatgcttgcattaccatggtatcagggaaaggtacttgctgttttaacttccagtagtggggccccatcctgcatatgcacccactcccctgttatttttagtcactgagcagcattagttttctaattagtttggtcaatggtatccagtatgttctgtagccctttgcaacactcttttcagaaagtgaatgattttagctagtagagtgcccataaattccacacagcaagagaatttttactagagtaaaatattatagattttcagagaataaagacctatacatgaaagtgttaaatactgtgtcttagtctgctagggttgccataataaagtaccacagactgggtggcttaatccacagaaatgtattttctcacggttctaggggctagaagtccaagatcaaggtgtcagcaggtttggtttctcctaacgcttctctccttgcaaatgaccakcttctcactctgtcctcacatggccttttctctgggcaagtgaatctctggtgtttcttcctcctcttacaatgacagttcatactgaattggggctctacccttagggccttctgtaacctaaattccctctttgaaggccctgtctccaaatacagtcacaatggggatgggggcttcaatacatgaatttgggaagggggctgtgggagatgaaatttagtacgtaacactttgaaaaaagacatcttcaatatcataaatataagtaatctcactgaaagaaactcctctaaatatttctgagcattccttccaaacctctgagaaagtaaattaggcaaagtatacagtacagctgtcatggattttattttacatctcaggtttaaaaaaatgccacattggttatttttctaaattatatttaatctgatcaacggggtgtggaaaaatcaactgtggttattattggggctccatcacccctcatcatccaggtccagtgtagagcctgaaattcgtatatggctgagaacatttgggagacccctggtgtttagccctcactggtcatcatcatcacaggtggactttcctagtacgagtcacatgatggcttcagggctgaaaggtgggtggaggttctgctgaggtgggaacctagcaccttgggtcctacctccctaggaagataagggggaggaagtcagcagagatttctgctactcttggagcccccagaccactggcttacctccctctcagatttagccaacagtgtggctccttcctccggcctggccacttctggttcccctcatcatgtagccctctacctgagaatctctcctcattggggtttagaaatgcatgtttctccttatatccatcatttttttctcactattacaaaaaataaaaataacaaaagacctgaacggagttgccttgtaggctgacttactcagtagagatgacagctgaagtctacacagtccaggaaaatgaaatgttccacatctgtctcatcacagcaaccaggaggagagcacaaatcccttctagcggacaatgagagacatcataaactacagagataaagacattgaatgagttgcattacagtctctttcaatgtcttttaagctgtctctattttactttcctcacctgccctccattcttaatttcttaggagtgtcaaaacgaacctcagtttcatcacaggaagaggaagtctgatatcaggagagagtagatgagaagaaatgtgaattttgccaacaacatattcttccccctttcatatgactctattgttctaattttatccaaagctctacaaaactattcacttcaggaaatctcaataatccagtagccattctggagtcaaataaattctgcaaatgtgttgctaagaaattggattgggaaaatataaatacatgagttagataagcagagtagaaaatgttctttagctaagacacctggtcaacatttgtattccttatatatcttattcctgttagctagctctcaatgtttgaacaagatggacaagactgattactgtgttctttgatattagttgggacttctacatgcaggattgattcttataataaaaagatactttgcataattattttccataaaattgaataaaatataaatcaaatgtcataatttttaaaaactgtcatgttaaaagtgttatcattaaatttccccacatcaagattcttttgtcaaaaacttctgtcatatttttaaaagaagtaaaggatgaaataatgtgattactggaatttgcttcaaaataattcagagctgggacaggaagggaatgaaaggcaagatggaacaagactgaccatgggatgttaattttcaaggcttgtgatgaatacgtgttgattatattactctctctatttttgtatatgtttcaattgttctacaatagaagttgaaaataagtaaaacgtcaaaattgaatttaggactccttacaagaaaattaagaattaggtgggggggggaggggtgctggcaagatggccaaataagaacagctctggtctgcatctcccagcaagctcaacgcagaaggcagtgatttctgcatttccaaatgaggtacccagttcatctcatcaggactgattggagagtgggtgcagcacacagagggtgagctgaagcagggtgggacgttgcctcacccaggaagtgctaggggtcgtggaattccctctcctagccaagggaagtcgttagggactgtaccatgcactctggcccagacactgcacttttcccatggtcttcccaacccgcagaccaggagattccctacagtgcctacatgaccagggccctgggcttcctgcaaaaaactgggtggccatttgggcagacactgagctagccacagaagattatttttcataccccagtggcgcctggaatgccagcgagacagaaccgttcactccactggaaaaagggggctgaagccagagagccaagaggtctggctcggcgggtcccacccccacgaaaccgagcaagctaagatccactgtcttgaaattctcactgccagcacagcagtctgagctcacccagaggggcatctgccattaccgaggcttgagtaggtggttttcccctcacagtgtaaacaaagatgccrggaagttcaaactgggaggagcccaccagagcccagcaaggccactgcggccagactgcctctctagatttcctcctctgtgggcagggcatctctgaaaaaaaggcagcagccctagtcagagacttatagataaaaccgccacctccctgggacagagcacctgggaaggggcggttgtgggtacagcatcagcagacttaaacgtcccagcctggcagttctgaatagagcagtagatctctgagcataccattcaagctctgataagggacagactgcctccttaagtgggtccctgaccccatgtatcctgactgggaggcacctcctagtaggggcgacagacatctcacacaggagagctctggctggcatctggcgggtgcccctctgggacgaagcttctggaggaaggaagaggcagcaatccttgctgttctgcagcctccgcggtgatacccaggcaaacagggtctggagtggacctccagcaaactccagcagacctgcagcagtggggcctgactggtagaaggaaaactaactaacagaaaggaatagtatcaaaatcaacaaaaagaaagtccactcaaaaaccccacccaaaggtcaccgacttgaaagaccaagtgcacgcgcctgtagataaatccacgaagatggggagaaaccagcgcaaaaaggctgaaaattccaaaaaccagaacacctcttctcctccaaaggatcacaactcctcgccagcaagggaaaaatctggacagagaatgagtgtgacgaattgacagaagtaggcttcagaaggtgggtaataacaactcctccaagctaaaggagcatgttctaactcaatgcaaggaagcttagaaccttgaaaaaaggttagacgaattgctaactataataaccagtttagagaagaacataaatgacctgatggagctgaaaaacaccacacgagaactttgtgaagcataaacaagtatcaatagccaaatcaatcaagcagaagaaaaaatatcagagactgaagatcaactcaaaggaatataacaagaagagaagattagagaaaaaggaatgaaaaggaatgaacaaagcctccaggaaatatgggagtatgtaaaaagaccaaatctacatttcattggtgtaactgaaagtgatggggagaatggaaccaagttggaaaactcacttcaagatattatccaggagaacttccccaacttagtaagacaggccaacattcatattcacaaaatacaaagaacaccacaaagatacgctttgagaagagcaaccccaagacacataatcgtcagattcaccaaggttgaaatgaaggaaaaaattttaagagagccagagagaaagggcaagttacccacgaagggaagcccatcagaataacagcagatctctctgcagaaaccctataagccagaagagagtaggggacagtgttcaacattcttaacggattttcaagccagaatttcatatccagcaaaactaagcttcataagcaaaggagaaataaaatccttcacaggccaggcagggtggctcatgcttgtaatcccagcactttgggaggctgaggtgggcggatcacgaggtcaggagatagagatcatcctggctaacacagtgaaatcccatctctactaaaaatacaaaaaaaaaaattagctgggtgtggtggtgtggtggcacgcacctgtagtcccagctacttgggaggctgaggcaagagaatcgcttgaacccaggaggcggaggttgcagtgagccaagatcatgccactgcactccagcctgggtgacagagtgagacgctatcaagaaaaaaaatcctttacagaaaagtaaatgctgagagattaaaagaataaagaaggaagagcaaacaaattcaaaagctagcagaagagaagaaataactaagatcagagcagaactgaaaaagatagagacacaaaatacctttcaaaaaatcaacgaatccaggagctggtttttttaaaggtcaacaaaatagaccattagccagacaaataaagaagaaaagagagaagaatcacatagattcaacaaaaaatgataaagggaatatcaccaccgatcccataaaaatacaaaccaccatcagagaatactacaaacacctctatgcaaataaactagaaaatctagaagaaatggacaaattcctggacacatacaccctgacaagactaaaccaggaacaagtcaaatccctgaatagaccaataacaagttctgaaattgaggcagcaattaatagcctaacaaccaaaaaaagtccaggaccagacagattcacagccgatttctaccagaggtacaaggaggagctggtatcattccttctgaaactgtcccaaacaacagaaaaagagggaatcctccctaactcattttatgaggtcaccatcatcctgctaccaaaacctggcagagacacaacaaaaaaagaaaacttcaggacaacatccctgatgaacatcgatgcgaaaagcctcagtaaaatactggcaaactgaatccagcaccacatcagaaagcttatccaccatgatcaagtcggcttcatccctaggatgcaagcctggttcaacatacgcaaatcaataaacgtaatccatcacataaaccaaaccaatgacaaaaaccacatgattatctcaatagatgcagaaaaggcctttgacaaaattcaacagcccttcatgctaaaaactctcaataaactaggtattgatggaacatatctcaaaataataagagctatttatgacaaacctacagccaatatcataccgaatgggcaaaaactggaagcattccctttgaaaactggcacaagacaaggatgccctctctcgccactcctattcaacatctgtagtggaagttctggccagggcaatcaggcaagggaaagaaataaatggtatcaaataggaaaagaggaagtcaaattgtcactgtttgcagatgacatgattgtatatttagaaaaccccatcgtttcagcccaaaatctccttaagccgataagcaacttcagcaaagtctgaggatacaaaacaaatatgcaacaaacaaagagccaaatcatgagtgaactcccattcacagttgctacaaagataataaaatacctagaaatacaacttacaagggatgtgaaggaccttttcaaggagaactacaaaccacgcctcaaggaaataaaaaaggacacaaacaaatggaaaaacattccatgctcatggatgggaaaaaatcaatattgtgaaaatggccatcctgcccaaagtaatttatagattcaatgctatccccatcaacctgccattgactttcttcacagaattagaaaaaaactactttaaatttcatatggaaccaaaaaagagcctgtatagccaagacaatcctaagcaaaaagaacaaagctggaggcatcatgctacctgtcttcaaactgtaccacaaagctacagtaaccaaaacagcatggtactggtaccaaaacagatatatagatatctgaacagaacagaacagaggcctcagaaataccaccagacatctagaatcatcttatctttgacaaacctgaaaaaagcaagcaatggggaaaggattccctatttaataaatggtgttgggaaaactggctagccatatgcagaaagctgaaactggatcccttcttcataccttacacaaaaattaagatggattaaagacttaaacctaagacttaaaaccataaaaaccctagaagaaaacctaggcaataccattcaggcaataccattcaggcaataccattcaggccataggcatgggcaaagatttcatgaccaaaacaccaaaagcaatgagaacaaaagccaaaattgacaaatggcatctaattaaactaaagagcttctccacagcaaaagaaacaatcatcagagtgaacaggcaacctacagaatgggagaaaatgtttgtaatctatccatctgacaaagagctaatatccagaatctacaaagaacttaaatttacaagaaaaaaacaaccccactgaaaagttggcaaaggatatgaacaaatacttctcaaaagaagacatttatgcagccaacaaacataygaaagaaagctcatcatcactggtcattagagaaatgcaagtcaaaaccacagtgagataccatctcatgccagttagaatggcgatcattaaaaagtcaggaaacaacagatgctggagaagatgtggagaaataggaacacttttacattgttggtgggagtgtaaattagttcaaccattgtagaagacagtgtggcaattcctcaaggatctagaactcggaataccatttgacccagccatcccattactgggtatatacccaaaggattacaaatcattctactataaagacacacgcacagtaaacagtgccgtttactgcagcactgttcacaatagcaacgacttggaaccaacccaaatgcccatcaatgatagactggataaagaaaatgtggcatatatacaccatggaacacttgcagccataaaaaaagatgagttcatgtcctttgcgggcacatggatgaatctggaaaccatcattctcagcaaactagcacaagaacagaaaaccaaacatcgcatgttctcacttatgcatgggtgttgaacaatgagaacacatggacacagggaggggaacatcacacactggggcctcttggggggatagcattatgagaaatacctaatgtagatgatgggttggtgggtgcagcaaaccaccatggcacatgtatacctatgtaacaaacctgcacattctgcacatgtactccagaacttaaagtataatttaaaaaacacaatttgcattttaatttaaaattgcaccagaaatctttacagtaattctgataaggtcattaaatcattctttcctttaaaaaaaaaaatgaagactgacaacaaatatgatagaaaggccaacttataactacttgagaacactggacaagtgtcagagtgatgtggaaaatttcaactacttctgccgttaaagcgttcagaaccccagggaattgagctcttttgtcttcttctgtcatgactgtgaaagctgatgggtgtgtcagtcacccctcaaagtggtgctttggggaataacatcactgtggcagctagtgccaactgatgctcatgctgttttcctattctctaaggtcttgtcaatcagcagctgcacttctgggaagaattgaaaaccaaaccccagtggcaactctccataccctaataatctaataatggggtaaataaatagcaagaggcaaagatgctggtattcccccctcctttatccttaatcttctggatccaaggctggctcctctcctcttgctatcttaatcttctgggtcccactggaggacaaatatactcatttcagaattatctattaaatggggtagggaactttgccaggtgttacaaggatgtgcaaaagtatcagccattctctcttcccctagagggctgggaactgagacataattaggatacataaaggtgaaataagtgaaaaatgcaaggcagtgttgaacatatgcccactgaataaaacaggtatcaaatattgtgagagttcagagtagggaagggcccatagttgaggaagtaatttggaaaagcttcacggaaaggatgggatttaaatggaggctttaactatatccaaattcaaggactgagtgagaagcacatagtgcagtagaaagacaactgagtcagacacatctatctgccttccaattccagctgttatctctgagcctgcattctctcatgtataaaggttgttataaagacttaaaatattaacatttgggaaaatgcctgtaagtacataggttcccactgattgtttgcttttgttttgtgttgttttgtttttctgagatggagtcctgctctgtcgccaggctggagtgcagtggcacgatctcggctcactgcaacctccaactccctggttcaagagattttcctgcctcagcctcccaagtacctgggataacaggcacccgttaccacgcccagctaatttttgtacttttagtagagacagggtttcaccatgttggccaggatggtctcgatctcctgacctcgtgatctgtccacctcggcctctcaaagtgctgggattacaggcgtgagccaccacacccggccaattgtttgcttttttatacatatatattggtataggaagtcacaggataaaaatgtctaaaccaaagttacagccagattgtagacaccttgagtatcagactaagggatttagactttattctatggatatccaatgtttaagccaagaaggtcatcgtgaaagtaatatttgggaaagatgattgcagcagttatgcaacctgtttgagagggaagacttgatccagataattcattaggttaatgcaatagtctaagctatgggctaatcccagagatgtggccaaagatgaatgtatcatgaaacttgaatgggacccttccaaggcctcagaaaaaaaaccccagacataccctcagagtcacaagggtttgtaaaatttgcaaaaataagatactatagttggttaagaccaccgtctstttccactcctagttcttccttcaatatcatttytctcttgtggtgctctggagtggcagtgagcactttgggaatcagactagtgggatttgtgttggagagagatctagttctggtttagtggggtatgtttatgtggattgcagtcacttcccggaagagttaggttattattatctttacctatatagaaatggcttcagaaatatgcctaacccccagtgccaactcccagaagatgcagaggcacaggctgtattgcaacataccatgacctaagacaccaaggccccaaaggcaatgggtgatagaagcagaaaactattttggaatgtatggagccataagcaagtcagtggaaaattcttccaaccatcagatgtataacattggaagtggatgatttggttttcaytgacagctaatcaaaaaacagatgttctgtcccattaggaatatattaytggacagtgcagcatatacattataactgtataaccacattataataataaacacactgtactttgtttctgtttatattggaaatgtaaaaaacaggtataggctgggcacaatggttcatgcctgtgatcctagtactttgggaggcagaagcaggcagattgcccgagcccaggattttgagacctgggcaacatgacaaaaccccgtctctacaaaaaaatacaaaaattagcctgggatggtggtgtgctcctgtaatcccagttacttgagaggctagggcaggaggattacttgagctggggaagttgaggctgcagtgagttttgatcacaccactgcacaccagtctggaaaacagagactctgtctcaaaaaaacaaacaaacaaacaaacaaaatatatatatatatatataaaatactatatatataaaatattatattttatatataaaatactatacagaaaatattacattttatatataaaatactatacagaaaatatattttatatataaaatactatacataaattatattttatatataaaatactatatataaaatattatattttatatataaaatactatatatataaaatattatattttatatgtaaaatactatatataaaatattatattttatatataaaatactatatacataaaatattgtattttatatataaaatactatatacataaaatattatattttatatataaaatactatatacataaaatattgtattttatatataaaatactatatacataaaatattgtattttatatataaaatactatatacataaaatattgtattttatatataaaatactatatacataaaatattgtattttatatataaaatactatatacataaaatattgtattttatatataaaatactatatacataaaatattgtattttatatataaaatactatatacataaaatattgtattttatatataaaatactatatacataaaatattgtattttatatataaaatactatatacataaaatattgtattttatatatataaaatactatatataaaaatattgtattttatatatataaaatactatatataaaaatattgtattttctatataaaatactatatataaaatattgtattttatatataaaacactatatatataaaatattgtattttatatataaaacactatatatataaaatattgtattttatatataaaatactatatatataaaatattgtattttatatataaaatactatatataaaatattgtattttatatatataaaatactatatataaaaatattgtattttatatataaaatactatatataaaatattatattttatatataaaatactatatatacgaaatattatactttatatataagatactatatatacaaaatattatactttatatataagatactatatataaaatattatattttatatataagatactatatatataaaatattatattttatatataagatactatatatataaaatattatattttatatataagatactatatatataaaatattatattgttatatataaggatactatatatataaaatattatatttgatatataagatactatatataaaatattatattttatatataagatactatatataaaatattatattttatatataagatactatatataaaatatgatattttatatataagatactatatatgaaatattatattttatatataagatactatatatatatgatattttatatataaaatactatatataaaatatcatattttatatataaaatactatatataaaatgtcatattttatatataaaatactatatataaaatatcaaattttatatattaagtactatatataaaatatgatattttatatataaaatactatatatatgatatgttatatataaaatactatatataatattatattatatataaaataccatatatataaaatattatattatatataaaatactatatatataaaatattatattatacataaaatactatatatataaaatattatattttatatatataatataaggtgaaataagtgaaaatacatgatattttatatatatatatgtgtgtgtgtatatatatataattcctaggtttatagaacacaaacttttggtcccatctcatggtaagcctaaagcagcttattatgaaaaaaaatttttgatagttttttcatagatttgataacaattttatgacattaccaataatgaactgatgatgaaagaaacttttctaaaccattaatagtttttaaaaatgtgaatccattaagttgaagaaagactgggttgcctttctattctttctacagaaaatattacacagtcctttgcttacaaagaggtgatcaacaagtacatagcccccaccccccccmaaaaaaaagaagtatcagggaaaaatcaaggtgttcaggtatattaggcagtgaattaataaaaatgttgtgctatttgtatggattttgtaatgtttatgatgtttgtgtgctatgattccttttcccagcctaaataaaawttaacttccatgcctaattttgtatttataattttttctaaaagagagttccttaaacctggatctaccccctgattrtgacaatgagaataaaatgaaaagaaaagatgcagacattcaggaggaatcatgaagagggaagaggcccaacctgaggaattggaagaatgaaggcatctcttcaatttggtttttagatatgctgggtttacctgatggagcagaatagaagagtctaatatcatcctgaagcctaagaaacagatttcaggctaaagactgtttaaagcagcatcctccctgggattatctcaaagcatggttggaaagagtaaactagacctagtcatcttttctttactcttcattgtctctacatggtatttccaagctgtgaagacataattctgtgggctgttcataaatattacatgaaagatctaacctgacaagtatatgtgagaaactgggtcaaagaaaattgaacttgtttctttaacaaccaatttcttagatcctttgatatgctaatttgcattactaatctcctgtagaaggctatcccattgaccacagaaacattgtccactcctttttgggtgccagaatttttgggaaaatggtcagtgacacaagtttggaatactcacgtctagtagaaaataaatgaaaggaatgtcacatgccctcaatggcccactgccactacccacactgcattctctatcatctgcagcaagctcccaacttatctttggccctatcgccaccacccctttaccccaaaacatgctccaaactctggacaaagtcatctttctagtatgcaaatcaggttatattaacatcctcttattgcttttaggaaaagataccagttcttagcagagagacatggatctcttcccaagctgttgctcccatctatctatgtggtttccatgacagctgtgttattaatcttgtcatagttgacaagtctctttttctggattttaggacttgggaataatagagtcagcggtcatgtttcctgttatgtgacccttagaagaagaggtgtctgcagagagaaagaaaacagatacacaggatgaaccaagacgagcaggtgctgatgttattcaaggtcagatgtccctgtgaactagccccactcctgtcctagggctctatagatggtgcttcatatttatgattaaaatatttttgagttgtttgaggtgtgcttctggtgcttgccacagagagtccccatgaatgcaaatagttcccaagaacttttatgacttgggacctatttaactgtccaaaatcatctttgtttatttcccatctcaccttttatgttcaataccacaaacatgttaggcccctctcaccttcaaatccttccttgaacatactcttctatttctttattcatcctttaggtcttgattaaaatgcgttttccttacagaaacctttcctgacttccaagtctgggacatgtgcctctcaccgccgttgtcctcctataaaaggacttatctcactgtgtgtcattccctatttgtttcctctcctgtgtatttctttatcataaatcccttctgtaaagtcaggagccatgactattttaatcatcgttcaattctcactggctaacacgtgtcagacatatactaggctctcaatatatatttgttgaatgaataagtacattaatcactcaggtaacatgtgtaaaatagtagtaaatgaataaagaatgggatgaaaacccatgaatccagcccccatctaaaaagcagagcactgctggaacctacaaatttcccatgtgttcttctctgttctttcattttcccatccgtatcccccagagatcaccaatatcccaaactttgttttctttatttaatcggcttgcattttcttaagggtcataccacatacaaggagacttcaaaaagcttgtggaaaatggaactaaaagataaaaataaaaattataagaagaagaagagcaggagttactatgcagtcattaataatattgtaaaatatttcaaacagtatatgggtatatgggtactttttgttaaagatggcaagttgaatgcatatatttacctctgcctgcttagaaaactctacaaaattacattaacagggtcacagaggagaaagctcctaaggcttaaagaataggagcacagacaacagcacattagatatgtcaacaaaatcttagaagcttgaaagcaagcagatgagcattcaccaacttgatacaccaaaagatgaccgctggccaagcatggtgccactgtctgaaagagagtctaaacctggatctaaacctggatctgttctggactatgacaatgagaataaaacagaaagtatagatgcagacattcaggagaaattatgaagagggaagaggcctaacctgaggaactgaaattatgaagagggaagaggcctaacctgaggaactggaagaatgaaggaatttcttgaatttggtttttagatatgttgggttgacctaatggagcagaacagaagagtctaatatcatcctggagcctaagagagagatgtcaggctaaaaactgtttaaaggagcatcctccctgggattatcttaaagtgtagttggaaagagtaaaccagccccaaaaactttttgaaaacccctcatatataggtattcctaaatgataaaattgtgttgcttattttagcaaatttgaagtttataaaactggtagcatgaaacttttttgaaacttttaacaacacacagtatttcttctaagcttcatccacattcatgtatgtagtggtagttaactcattttcactgctgtatagtattgcattgaatatactttccacaattgattgatccattttttcccattcttcccatcactcaactctccagattccttctataatctataaattctataaaattatataattttatatttatataaatttataaattctataaaaattttatttcccaaagatggcacaacaatattcctcataccatgtgctcttctctttgtgacattgccactatcccatcaggaagtgtttaatttccctctccttgaatctaggtgggcttgcgactgcttcaatcaatacagtattgcagaagtgaggctgtgtgacttctgagactagaccataagtcttatgataatgcagtttccatgttgttcaccagaacactcatgctcttagagctttgagccaccatgtaaaaagtcaactgccccaaggccaccatattttgaggaagccacaccacatagaaagcccaatgtgtggacactgcagtcgtcagtcctgattttcaaaccagtgcagcccaggtgtcaggaatatcaatgaaggtgcttgctgatggttccaaaccccatcctttgagtcactcctagcctttgagtcttctcaattgaggtctcaaatatcctatagcagagactagctaacccccatgtgctcaatccacattcctaatccatgggcacaactgtaaacaactattaattagttttagagtactttggtgtgtcactatactaaccagaaccatttcttagtaatgtccctcctctgggccccatatctacctgggagaaatcgtccccttgccttcaaggcccgtctaactttatcaaccaatgttcttttctctaatacccgccatagttccttctaactaaatcagctcataattctttattaaaatgttataaaaattctttactaaaatctttcctctgcctccaccaacttcacaggattctaggtctcctgctcaagcagaaccaccttgcaaccatttgccactcacttcaacatttagtttctctaaagacttctttacctttgagtaaatttgtcttaacagtgtttctcccagtgtggtccacagaccacctgcatcagaagcatctgggtccttatttaaaatacagattctgggcagcaccccacacatactgaatcagggtcactgcatttgtagcaagcaccccagatgtgccttaagcatcccagtgtttaaaaatcatgaatctcttgtgaattatttataggggatgggaggtcagtgcatgtagcgcttggtgtaaacttgagaaaagagacctaggagaactcagacagaaatccttttctttttgccaactaaagcaattaaaaccccagtgctctatatatctctagccctgtttcttttcccaggcactataaaaccatgaccccaaagttatacagcagatgctcagaaagcattgcaagccttgaacttaaggtaacaaataaatgaatcaatgaaagaatgtagaatttactgtctacaaatcattacaaaagaggttctgattttcagatcttggtatgggttagtgtcaaggatggggaatatatttataattttcaatgatattttaaatacataatagtcatatacacaaacatgcattatgtcacttaccccaggcatgagtatttcactaatctaaacaatccctctgtggaattgctctttcattgtgcacctttataaacattctttcagttctgttttcctgtttccaaagtgtgttgtttatatgtttctatacaccctgccttacttcacaaaggattttgaatatttattccacttgtatattaaaacaaatacagcccgggtacggtggctcatccctgtaatcccataatgaggcaggcagattacctgaggccaggagttcaagaccagcctggcctacatagggaaaccctgtctctactaaaaatacaaagatttgccaggcgtggtggtgcacgcctgtaatcccagctactcaggaggctcaggcaggagaatctcttgaaccccagaggcagaggttgcagtgagccgagatcgtgccactgcactccagcctgggtgatagagggagactttgcctcaaaaccaaaaacaaaccaaaaaacaaatacaaataggtggcaagaatgtttccatactcaagtcagctgttccccaatattagaggaacagaagcaaagaaccatgacttccccatccctgtttatctgagaaaattataaaagttgcctgtcacttaacttgtcatgtaattacctaatagtgtttgaatataacattaagaaatgtgttcttagctatattcatgccaatgttacaagttcctctttctcaaccaccatttactgtttgtgatcttcttctaaaccatcacaaaatgtgcatgtaaaaggcaggaaagcaagaaataaaggaaagagaaggagacagggagaggaaaatctgatgtaagaagaattcctaaatagagaaatctatctcttatgtcataagaatcactgaattctcaaatctcagagaagattcactagactgctgcatcaacttgacacttgctttgtgttattttctcttatactgtgctctattttacacacacatcttccagtaatttataagtgctctgaaagtacagataaagtgtattttcactactgaaccttaagatgatagccagttggtacacattctttaagttctctgtcagagaatttctctcttttaatgagacataaaagagttcactttgcaacaatgagctataaaaatagtaaccacaaaagcagcaaaatgaattcaatgcttaaaaatatatagatcaggccaggcatggtggctcatgcctataatcccagcactttgggaggaggaggtgggaggatggcttgaagccaggagttcaagaccagcctgggcaatatagcaagaccctgtctctataaacaattaaaaaattaagtgggtatggtggtgcatacctgtagtcccagctactaggagggctgaggtggaaggatcgtttgagtccagaagtttggagctgcagtgtgttaagattataatactgcactccagcctgagcaacagagtgacaccctgtctctaaatacacacacacacacacacacacacacacgtacgtacatacagatcacatatattatttcatttgatcctcacagcaaccctataatgtagacgaaaagaaattattaatttttcaggtttttttacatgtgttctctttttcttgacacgtactctcttctgatatctacatagcttcctccctcattttgttcaagttttccctcaaatgttacctattcagaattctcccttgactactcaaaaaaaatagtacaccatctcctactctccccctcaccccgcttactctgctttaattttccccatagcacttttgccatatgacaagatgtagcttttgtatgctttctctacttggatgtaaactccatggtggtggtaatttagtttgtttgctactatttctccaatcccagaagagtacctagcacatagtagatgctcaataaataaatgaatgcattattcccatttcatgaagaacaagtcaggaagtgtgggcttaacatatttgaccaacatggcacatcaaatgaatggcagattagtttctgcatcacaggtgttaactccaagtccccctatattttcaggaccatcagaaagaaattgtgctaacttgatgtacacgattgacttcgctggcattaatttctggaataacgtggatcttcttttgctgcttcacgagtgttacctggagaaaaaaatgaaagcaggccacgtttactgatactagataggatggtaggaaaacgtataagctgagccataggcaaggcaatctgcatcccaccaagaagcgatgcacatttcctcggtgtcaatcttacttccatggtccctaaacaagccttttgcaaattatttcaaagcactctttgccaataagcaaactgatttcttccacaatgatagcatcttgagatatgatgctattaagataacaaaagccattggctattctcatagtggaccatttagcagtatgacaggtatgcgatattgcatgaacactggcaaggggaacagcctttgcaaatgggtccaataattgctgtgctttcatcagattataagtatagcaataaagaagtcctcatgtaattttagacagtactttcccttggcctt

SEQ ID NO: 95858 - DNA, 89084 bp, Homo sapiens
  misc_feature (1)...(89084): n = A,T,C or G
agggagctgggtcttccctgctccctgttatgatcacagttgccgcatctcccaagcagtccctacacgctgcactcctctgggttccatgaagttctccacaccccaagccctcaggstcagggtcagggtcagggtcagggtcaggttcagggtcagggtcagggccctgctgtccctggccctgggccatggcaccatcctgtgctccccaaccagtgccacgttctgctcacttgtcttgcacatgcctgcgctgaatcctgggtgggtgatttcctcacacttagtggccagcccaggcccagggccatcagggacagagcttccaagaaggcccagttgctcctttcagctttctgatgctacatgagcttttccaatgcaattatggtgatggctgatggaaactgattttttaaagttattatttttaattgtggtaaaataaacataacccaaaatttaccattttaactattctttagtgcacagtgctatgtttttaagagcattcacactgtcgtgcaaccatcactgccatccatctccagaactttttcaactgaaactctgtccccattaaacatgaactccccattctcccctccccatggcccctggcaccccccattccactttctgtctctatgaacatgagtactttagggacctcatagaaacagaaccatttgtcctattgtggctgggttaactcagttagaataaactactcaagattcctccatgttgtaatgtgtgtcagaattttcttcctttttaagtctgaataatactccagaatattgactttttaaagatgtttttactttgcaaaataagaaaatgagaatctaatatcagttactggaatgctgttgaaattgccctggcctatgaaatcagaacatcttgttaccactggacaacagagtgaaacccacagtctgcaccccatgttgtggcctcgtgacccctgactttgccagcttctctcctgcagctgcaatgctttctcctgattcctcaaaaacaacccacatccccacctccatgcaccaatgcatcattcttacattctctccaactggaacgtttcttattttttgctggttaaagtcatcacagtcttactgggccttatctcccaggtgaagcctgaagtacccagacccgctttcttcatgtctcacctctgtgatggttcacatcccctcccacctttcatatctgccacctgtgcattcatctcccccatagaggtgcgagcacctggagtagagacaccgtccctgcctcctctttgctcatttattcctctacagtgagtttctgggggccatgtgccagccaggtgctggcaccagccagtttgcatgggggtgcaaacacgcaacacccccaggttagatttggcatggggctggagaggacctggcaggagcagggctgtaagctctgtggcccagaagcattccatctatgtctgcaggtcatcaggtgggctctggtgtgtggcacagagctctgttaagtctcatccctaccttcgcctctacatgaaaaattgcatgcaggccctttaaagggggaaatatggagaaaaccattttgaattcttggttcccactggggagaggttctaaggggtggggatcaggtgacatcatgagtaactcacgaggcagggtagaagcatctgaacgaggcatcctaggagataaagagaaacactggctccaaaattaaaacaaaacaaaacaaaacaaaaacaagcccaggtcacttggcctccccgctttgatttcccacaggctatgaccttcaagttaatgtttcctttgcagcgtacacacagtcccagttactgattccccaaaaacaagctgaatcatcattatacaacagaaagagaacccatgtctatcccatcccccattcacagagccctgagccaggcttgtctcctaatctgcctctggattggagcagtagcccccattgttctacccagacttgggctgtgtaagtgcacactgctttccctgggaggacttagccaccagggccctgcggaaagcccgggcagaggctctctctgcagggcttatccagccactgtcactgcaggtgcctctcctggatcagggcctgtgcagggctgtgggatacacagatgaaacaggccctgtccctgccctcagaggtgttgcagttgataaagagacagacacacatataaatagttgcattagagtgtggtctgtgctgtgagtgagggaattcccaaggagaaggctggggtcaggcttcccaaaggagatgatgcacaagcccatccctggggcacaggcagggctcagctggtggcttcaagaagcagggcattcccggcacagtgaactgaactggcaaaagagggtttcagtgggactcgttcagagagtatcatatagtcctgggacagggacaagctggcttctgccactgtctgacctcaagcctcagcttctctctctggtctatgaaaggatggattcggaaatcacacagttacttccaccatctttcatgtgttaaaaggaagtcactacgttcagcctacattcaaaggcaggggaattaagtgccactccttgaatggaagagcatcagagagttttaaaatgaccacagtccacctactggccacaaactacttacatccttccacatgcaaaatacattcgccctccaaacatcccctcaaagcctcatcccactgtagaatcagctcaatatccagaatctctgcatctaaatcaggctttgatgtgggtgaagcacctggggtattattccctcaagtgtagctccttgagtagagttgctctcaatctacagacttaggaattccagagacaaattaactgcgcctcccccctgcacccacctgacataaactggtgggataggcattggataaccactgtagacgtgcctgctccaaagggaacaaggacaggaggcatgcaggagtaactagtgtacggcaattctaaaatcttcctgggcgggtcctgaaagtctcttgaataggactcagtctgactctggccccagagtgattctccacgctcttggctccaccctttgggttctttgttctattccccaagtcatcccttcttttccatgaaatgcagcccaggttcatatccgtatagtttctcagcttgcttcctcccagaatttgggggagtctagaggtctcttttcattttatattgtctctgaccctttcagtccaagtctacactgttttgctcatataattcttttaaaaatgttgcatgtctcctgtagatctcactgaggttcatgcctttagacaactgtcaaacccacacatctctttgagaaaagcccttctctctcttgggcttctgctgagactgctgtcaaggacaactgtaagcttcttagaaatcctactatttaacaaaatattctgaggtgtccctttgttctctttgaagattttacaaaagatctcatgaccacactcttggcttcatctttaggccatcttccttgcactggcctgcatttgctctttgcctggaagccatttgttagttttagcatcatatgacatctggagaagctggacattttcacagcccaagttatggttcctttttatttaacaatccttcctttggcttatgtcccttctctcacattttagtataagcagcaagaagaagccaggaggaggcaccttcaacaatctccttaatgagatcccccagttcatctggtacattttctactttccacatgatttcggaacactttctgcttaaaattccctcctctcctgctccatacctctaagagtatggattcctctctgatttcctaatacatctttttggggtgtctaacctccaagccattgttcagtggttcctgtcgcccatctgccttctcaattttaactcccaagttcagaacacaccactttcccattgcaggcccctaacactcagccagttttcctacagattatatggcacaccttccacacacagggcatgcattcagccctggggacttcccaggagaataagctagtcttcgccatcattgtccagagacatgttaatcaagcaatcccagaagcagtgataaaattgcagttgaaggcagggtgcagtggctcatgcctgtaatctcagcactttgggaggctgaggtaggtggatcatctgacgtcaggagtttgagaccagcctggccaacatggtgaaaccccggtgaaacgtctactaaaaatacaaaaattagctgggtgtggtggcgcatgcctgtaatcccagctactcaggaggctaaggcaggagaatcgcttgaacctaggaggtggagggtccattgagctgagattgcaccattggactctagcctgggtgacagagtgagactctacctcaaaaaaaaataaataaataaagttgagagaggttcatgaagaaaaattacaggcctctctgtgatcacataatggaggaatctgtcctagtaaggctgaggctagggaaagcttccctgaagtcatggcattttagtaggaacttcctgaagaatgatgggggttctctggacaaagatgaacggcacatggaaactttatgagtcgagaagttccacagatatgagggacagcagggagacctgcaggctggagcctaaagaacaaggggacagtgcctgaaagtaggctaagtggatcagcaggcacaggccacctcaatcctgggtgcccatactggcttatgtgagcaaaatacatgcattaagccattcaacaaacatttatttagcaactgctacaagccatcactgtgtattggggatacaacagtgaatacatctcacaaatttcctgtcctcaaagagcttacagtctagtgggagagacagacaatgaacaaacaaagaaacaaggaaatatcagatatacagttaagtgctgtgaaggaaatagaacagggtgatgtggcagggagtggctgagggacttccttagtttgtgtgacctggaacagcctctctaaggctctgcatcagatatctgatatgtgataccatatgggagcaggctctgaaagaacactacaagtagagaggtaaaggcaggggctgcagcaagcctgatgtgttcaggcactgagcagagagagggccaggtggtcgggacttagcgagagggtcgcctcaaaagaagtgaggcttagcagggcacggagcagtgcggccgcaggtgtggtgggaagggtgttccaggagaaggagccacctggacacaggcttgcagtcatgaaacaatacgcaattatcactcccggcattctacatggccttgcctgagaccgggctggccaggatctctgggaaccaggaggaggggtctgcggcaccaggactgagtagaagggagagagtggagaaggggaattgcagagagaaaaccaggggctgtttttctctcggagaggcgggtaggcactgggcgggcagaagcgccgctatccacccggatgcgcagctgctaaggggccgcctctgcaagcggctgcaaattcccggagggcagcgtctcctttcgctctgctgtgtccgtagcacatggcaggtacttggcccatcaagagtgagagagggtgagcgagtgagtgagtcaccggcttggcgagggtctcctctgacccacttagccttgccagcgctcagaactgccagccctgctgggtgcttgggacttttcaaagccctgggaattctccaagggtccacagtaagtcttcttgacctaagcgggaaagagcgcaggcccctgcggggttggcttttacatggcatttatagacccgcccggagagggtgcgctgcgctcccgccatagtcccaccaccggtgagcgccgcccccactcggctgactctccgcccgccccgcgcccctcccctcacgggctctggccttaaccagagctcgcggactggcggggacaggtcccacctcctggctcccaggacgggtctgcaccaacctcagtttcggggctgcggctcacagaagtctaacctgcccgggacgcccgcaccaactcctgcgcgcggtgagtttctgggctctcgagagcgctggactcccggcggaaaggaggctgccccggctgcagctccgggggctccgggggctccaggggctccaggactcggttctcaccgcaagggctcctgcggggcccatcaacttcgccgctgggacgccgggctcggggtacgggtccggagttctttggagcaattgaggctgaacctggccaggggtcatcaggctaaatgaccgcagcgccaggactggcccgccgaggatctggccggccgcggtggtagggcccttacggagctggcgccaacctgtggggtgggcactgctggcccggcttatggaagagaaaactgaggctcgataagagaaagggaccagcgaaggcgacgcgatgatttgtgactggggactacctgtttcctgggcccctcgaccccattctgtgacagggaaaggtcttccctgattggccaaatctgggggcctggcacgagggcctcttgtgattggaggggtcgacgtgagcgctcaggggctgcgctggagtcccagctccagccactgcgctcaagtggacggtcgcgcgtgcagagggaggccggatagcagaccccacaacgtggctcctggggccccgctatcgagagctcaggccccgcgggcacttgcctaggagaggaaagaatcttcccaaagtgcagacagagacggaatttaatcaggagtcccagacttggagtttggaggcatgggctctggtgtcaggtgactttgtttcctccccacgcctccacttctccttgaccttgggcaagtttcttgtgttctgaatcttagtttcttgtctctaaaatcgggaggggcaatgaacagtagtgcctgcctcccaagattgcttgagaattacatgagactgccccgcgcctggccctaggaaaccctcggagaatgttggctgctgtttgtttgtttgtttgtttgagacagagtctcgctctgtcgcccaggctggagtgcagtggcacgatctcggctcactgcaacctccgcctcccgggttcaagtgattctcccgcctcagcctcccgagtgctagaactgcattcatgggccccagggccctagcaccagaacagagggcccagagctgcagtcctgcagggtggcccagcctcacagggactagaagctgggtcctggagagccaagcctgggctgggaattgggtaggagggttgggaggcccaggaagcctcccagtgtccccacaccaccaagtgaaaggacactgagcggccatgactgggggaggaggtggaggcctggaggcggcccatacggcccacaaggggctctatgggcttcactgcaggcccctgctctttctggggccaaagggcaagcctgattgaggcccctcccaaggctcccgtgcctgccattctggctttccctggactgtgacaacagccccttggtggccacctggactctgcctccctgcagggggggaacgacatactcttttatttttttttttcagaagtaatcatgtacaatataaaaaaagaacattcagttaagaaaacaaaataattacagtcgtcaaaaacctctgaaacccaaaaccctttacccagtaactttcaacatttcagtgtaaattcttctaggcttttaccctgcagataaacacacgcatgcacacacagacacacacacacacacacacaaacttaagccttacacaattatcgtggtttgttacttgttgggtgttttgaaagtgtcaggtttgtataactcaatatttaccaatattttctaataatttaatgttttcttcttatatttgattttcaagtatttatttttaacccaattggactgtattttagagtaagatgtgaactatagagctagattcatttatttatttcaattagtagacatttttagagcagttttaggtttacagaagaattgaggacggagtgcagagttcccatattctcagtctgtcccttcctgcgcgctttctcctatttttctttctattcttttcctttctttttttttttttctttttttttttttttgagacagggtctcactttgttgcccaggctggagtgcagtggcacaaacacagcttactgcagctttgaactcctgggctcaagtgattctcatgcctcagcctcccaagtagctgggactacaggcatgcacaaccacgcctggctaatttaaaaatttttttgtagagatgggtctcactttgttgcccaagctggccttgaactcaagggctcaagtgatcctctgccttggcctcccaaagtgctgggattacaggcatgaaccactaggcctggcctcccctatttttaacatcatgcattgataggatatttttgttacagcttttttctttttgaaacagtcttgctctgttgcctaggctggagtgcagtggcacaatctcagctcactacagtttctgcctcccaggttcaagcaattcttgggcctcagcctctcgagtagctgggattacaggtgcaccaccatgcccagctaattattgtatttttataatagtagagacagggttttaccatgttagccaggctgcttttgaactcctggcctcaagtgatcagcccgccttggcctcccaaagtgctgggattacaggtgtgagccaccaggcctggccaattttgttatacttggtgagccaatatcgatgcaatgttattaatgaaagtccataatttacattagaattccctcttggtgttgtaccttctatggttttggacaaacatataatgatgagtatccagtgttacagtatcatagagaatagtttcactgccctaaaactctcctgtgctctacccatccaccccccaacccccctacctatccctggcaaccactggttactgcctttgtagttttgccttttccagaatgtcatatagtatgtatgaatcatatggtatatagcctttccagactggcttctttcgcttagcaaaatgcatttaagcatcctccatgtctttctgtgacttggtaacccatttctttttatcattgactaatattctgttgtatggatgtggaggtaccacagtttatttctccattcacatactacaggatatcttggttgcttccaagttttagcagtgaataaagctgctatcaacatttgtgtgcaggtttttgtgtggacattagttttcttctcctttgagtaaatatcaagagcgattgatggatcacatggtaaaagtatgtttcgtgttataaaaaactaccaaacctttttccatagtggtggcataatttttcatttctaccagtaataaataagagttcctgttgctccacagcctcatcagcatttgttgtcagtgctcttaatttaactcttctaatacgcatatagtagtatctcattgttatattttaatttgcaatctgtaatgacttacagtgttgagcatctttttaaatgcttctctgccatctgtatatcttcttttgtgaatgtcggttaatttacttggcccattttaaaattgggttgtttgttttactgttgagttttaatagttctttgtatattttggataacagtgctttaccagatatgtcttctctccccaaccatggcttgtcttttcattctcttaacagtgtcttttgcagagcagaagttttaaattttaataaggtctaatgtaccattttttttcctccatgaattgtgctgttgttgttgtatctaaaaagtcaaatccaagttttggcagttacaaataaagatgctgtaaacatcagtgtacagatatttgtgtgatttttgtgcaatgcagattttctccattgtcttgcctttgtctctttgtcaaagttcagttgactgtattgatgtgagtttacttctgggctctctattctgttcaattgatctatctgactattcttttgccaataccgtactgtcttgattactgtagctttatagtaaagtcttggggacaggcagtatcggtcctctaacttcgttctccttcaatattgtgttgactatcccaggtcttttgtctctccaaataaacttgagaatcagtttgttgatatccacaaataactgctggggttttgattgggattgcattgaatctatagataaagtcggaaagaactgacatctggacagtatagagtttccctacccatgaacatgtactatctcttcatttatttatacatatttttatgttttcatcagttatggttattctcacatagattttgacctattttaggtttatgtataaataattcactttttggtgctaatgtaaatggttttgtgtttttaatctcaaatttcaattgtttattgctagtatataagaaagtaatcaatttttgtatattaaccatgactttacatccagcaactttggcagaataacttattatttccagttttctgttgctttgttggyattttccacatagccaattatgttttttgagaacaagaacagtttatttcttccttcccaatctgtagacttttcattttcttttcttttctaattacattagccagcacttccagtataatgttgactaggaagggtgaaagggaacatccttgccttatttctgatcttaggggaaaagcttctagtttctctccattaagtatgatgttagctgtaggtttttcatagatcttctttatcaagttaagttcccatttattactagcttgctgaaagctcttatcataaatgaatgttagattcttgtcaaatgcattttctggatctattgatgtgatcatataattcttccttagcctattcatgcgatggattacattaattgattttcaaatgtttaacctagaataaatcccatgtggtggttatgtataattctttttaaacattgttggattcaattgctgatttttttgaggattttaacatctatgtttatgagaaatattgatctgttagtttcctttcttgtaatgtttctggttttggtaccagggtaattctgacccaagaaaattagagaatttcctctacttctattttttgaaagagatcatagagaattggcataatttctttcttaaatgtttagtcatattcattaaccctagtgctttctattttggaaggctactggctccagttctttaatcagtataggcctattcagattatctatttctctttgtgtgagttttggaaygttgtactttcaagggattgtttcatttcatttaacttaccaaatttgttgatatagagttgttcatactagtattttattatccttttaatgaccgtaggatcagtattgatggcccttctttcatttttgatattagtaatttgagtcttctctctttttcttcttagttaacctggctagaggtgtctcagttttattcatcttttcaaggaaccagctttaggttttgttgattttctctattgacagcatgttttcaatttcacaagttctgctgtaatttttattatttcctttcttctgtttattttggatttaatttgctcttctttttctagtttcctaatttggaaacttgcttttagctctttcttctttaataatatatgcattcagtgctctaaatttccctctaaacactactttagcagcatcccataaattttgatgttatattttcattttaatttagtttgaaatattttaaattttttcttgagagttattctttgatttgtttacatgttgtttagaagtgtgtcatttagtttccatttttttaatgtttttcagatatctttctgttattgatttctagtgattctgttgtgatctcagtaatctccatcatagaagtcattgatatttgttgttgtatgttttatggcacagaatgtggtctgtcttgatgaatattccatgtgaacttgagaagaatgtgtattctgttgttgttgggtgaagtattctctaaatgccaattagatacacttaattgatggtgctgttcaactatgtccttactgatttccagcctgctggatctatcagttagtgggtactggccaggcacggtggcttacgcctgtaataccagcactttgggaggccgaggtgggcagatcacctgaggtcaggagtgcgagaccagcctgaccaacatggaggctctactaaaaatacaaaattagccggacgtggtggtgcatgcctgtaatcctagctactcgggcggctgaggcaggggaattgcttgaacccgggaggcggaggttgcagtgagccgagatcgtgccactgcactccagcctgggcaacaagagtgaaactccgcccccccaaaaaaaacgttagtggggactgacagagaggtgttgatgtctccaactgtaataatagtggattcatctatttctccttaaaattctgtcagtttttgctttacacattttagcactgttgttaggcacatacatattaaggagtattatgtctgctgggataattgactcctttaccattatgtagtgcttctctttattcctaataattttcctttctctgaagtctgctttatctgaagttaatagaactactccatatttcttttgattagtggtagcacggtatatctttctccatccctttatttgtaacctatctggtttttatgttgaaatgggtttgttgtagacaacatatagttaggtcacgattctttattcactctagatagtcacatgttttaattggtatatttacaccattgatatttgaagtgattttttgatatagttggattaatatttaccatatttattactgttttctatttgccctttgtttcttttttcttccacacttttttctgccttttctgatcttaactgagcattttatatgattccattttcttttctctcttagcatatcagttttacttttttgttgttgcttttttagtggttgacctacagtttgcaatatacacttaaatctaatttaagtctgcttttgaataacactatacaactttatgggtagtgtaagggccttattgcagagtattcttgattcctccctcccatgccttattattactgctatcattcatttcacttatccataagctacaatcactgaatacattgttgcaattattattttgaacaaattgttatctctcagattaagaataagaaaaaaaattatttcacatttatttctaatactcttttgtatgttgagtttctgacttgtttaattttcctttttttctgaattacttcttttaacatatcttgtaaggcagtttactggtgacaaattccttcaatttttgtttgagaagtctttctcctccacttttgaaggacaattttactgcatacagatggaatctagttagttctaagttgatggaatgttttcagttctttaaataattctttctattctattcctgattgcatggtttatgaagagacgtttgatgtaatcctcatctctctccctctataggtaaggtgtcctgccctgcctctccctggcttcactgaagattatctctgtgtcttttattttttgcagtttgaatatgatatgcctaagtatagattttttggggggtggggggtgatctttatcctatttggtttcctctgagctgcttggatcttggtttggtatctgtctttaattttggaaaattatcagtcattatcacttcaaacatttttactattyctttctttctttttattccatctgatatccctattacaaggatttacacctatggcaattgtcccaccattcttggatattctgttttgtcttttttattctatatttccctttgcatttcagtttgggaagtgtttgttgatatttcatccatctcattgattatttcctcaactgtatccagtctattgataaacctattaaagacattctttgcatttatcacagggtttttatttctagactttttttgatttttttcttaatttccatctctctgcttacatgaccaatttgttcttatatgttctccacatttttccattagagctcttagcattttaattatcattgttttaaattttccatctgaaaattccaacattgcttccatatctgattgtggtttaggtgcttgtttcatctttgcaaactgtgtttttgtcttttatatatcttgtaattgttttgcagaaaatcagatataatgtattgggtaaaaggtactgaggtagataggcttttagtgtgaggtttgatatttacctgtctaggagttagaatgtgtttactatttgctatagctgtgggtatcagaggatataattttctctcttcatcttcttgtttttgtctaccctgttgtctttgggtttttgtagaaactccttaaataggctctggcttgcagttctcttatccgtaatccccttgttactatactggagccctgtggatgtagtagyaaggtgttttggtggggggaagtgttttacagtcctacaattaggtcttagtgtttcagtgagcctgcacccctgggctgtgaccttcacaagtgtttctcagtcctaccccttttaggtgatgagaaaggctagaggggctggatttgggtttttcctcatcacttaggttagttaggccctgggtgtccattcacttaggctctggtataatagtttctatgagggtagatatgttgagaaaaaaatgactgctttccttgcctcctgccaaaaccagaaggggatttttctccaatccttactgtgagaactgtaagaattaaagaaagaggaaagaaatacaaaagctggcttgccagttaagacatttattttagagaaaatcaacctgaaaggagccttctggccaagttaggtcagaggcacactctcttacagactgagtttttaaggattcaggatgggagagtttatcagaggcttggactgcttctgtgwctctttgttgtgcttatctgggagggagagttgtgtgcctgttttcatacatttttcctgcagctgcaggtatagtccctgagtctgtttttacttatttattgagacagagtctcgctctgtcgctaggccggagtgcagtggcgccatctcggctcactgcaacctctgcttcccaggttcaagcgattttcctgcctcagcctcctgagtagatgggactacaggcatgcgccaccacgcctggctaattttttgtagttttagtagagacggggtttcaccgtgttagccaggatggtcttgatctccttacctcgtgatccgcccgcctcggcctcccaaagtgctgggattacaggcatgagccaccgcgcccagccaagagtctgcttttagctttcctgtcttagtgcccctgaaggaaagggaatgtgcttgttccttattattaaggcccactgttttactggggcccatygtatgagggtgaagtttggcagttacccaagatactttccccccacctccctttgtgtcccagctgtcttatccgtgttttactgtctgctctttctggctgcttgtagttagaagagaagtgatttccttgaaatgcatgaggctagaaagggagctggaatttaaagtggcggtgtttgtctgagatgacagtactcctgctctatcattccagaccctatggttataaaaggacaagaggggacatsttctttctagctacttcctgctgatgcgggggtggagagttttttggtcttagattgactgtaggatcaacaccatttgtagatgtttttgggtagttgcgaaatggccatgattctgtcggttaaaaatttttgataaaggttaattaggcagagtaaaaacattagtcctaggcttttcagcagcattttttattaggcccgactggttgagacagaagtaactttttttttttttttttttttaatgacaggcagaggtgcatgtttggaaagacccatgtgttattttttgttagtaactgttattcctgctatgaggataataattaagcaaaatgctacagtaattgagattctctgtcagatattccactctgagggttcacagtcctactgcaaatagtagagtgagtacagcagttcccgcgagggtgtcatagtaaataattttcattaaaaaaggttttaatagttggcttaaaaggagaagtagaaacgacaaaaagtatttggtgaggtagggttgagactgagtaagatgagcaatttttacttagttacttaacttttatgatttttagcttaagatttcttatttatttttttacatgaataggactttttttggactgttaggggttgctttctcagctctttaggctttgacttgaatatgatgtatccaggarttgatttctgtaacggatataatttaaactgtaaaagataataaaaattgaaaaatgttaggcaagactagaatttaacaacaggtgtgytatagtttttgaaacataatttttacttttcagtttcctatttttattaaaagaatttatgadaggactgatttgctttattatacttggcttaattatttgtatacagtgcagcaataataattatttgctacataggccttttaaatcagctttgatggaactttgttacatagaaggaatttgagataagagttgttaaagccaagcccagccatggatttgtaccattaaatacttatgagttgggtgaattccttttcttttgaggttttaagataacttggggttcctggcctgtcagaaagtgacattctttacttaccacacatcagaaaccctgtacagggactgtgmacacaaaatatgaggccagttttccaagggtttcattggcttcttaagtttgattccttagaggagagcacaccattccagtcaaagccttgggaaaataaccagtttttccaattgtattctgttacaaaagaaaatagattcttattgcactgatgcaaacaactgtagtgttgtcctttaagaatgcttataactagtttttaaattctagaggaactaggcaaagagaaaaaaacacgctttaaattctatttacaggagtatactttacttagttgttagaagctgtagctagcttaagacaagttttcttgactctgaaaaataagataaagattagcagcattctaaggaaaaggtaaaaacttgtttttgttttttattagtttagtgcattttattaatttttgttttgcttgatatttataaacattttagctttttgtgagttctgcatgttttgttgttgttgttgctgttgtgagaaacctgcctttgagagcgcttgttaaagtttcacagcttgaatataaaccacgttttgaagataattcaaacaaaataaaaattgtctgtaaataacaaaatgtctagtttggatactgttagaaacacaattgacaaagaaatgtggttgtttttgtggtttacaataacccaacataacaactttaagtgtgattaatagcacatatttagacataagaaccttagacatcccatacagtttcggaacatatgttagtattattccttagaatataacctattagacagtcttttggaaattttatgttgctaaataattctgtttacctctttttggatggtttaggggttttgtgcagcaccgaaaagccaggggttaggaaagacaacctcgagactaaagtttgatttggggaagactgttaaatatgtttaaaatttaaaaccctcgatattataaaatagaattttagattaccgttaagtttttttctgtttgttttgttttgctaaaatgatgagataacaatctggaaaagcaaaaaccatttattagccttttgtattacaggaaaattttgtttaagagagaaagttaaattttaccctttcattagtttgctattaatgttaactttaattttaatgaaaccttatagataattttatttaattttaatgagtttgactatgaagtgagatttttatatgcccattataacccttgacaagttttgctaaagagtagattagcattttaagaaaatcttgtggtgcttttattttagtgtttaatttacagaaaaaaagcatataatactcttttgagtttagttaatgtgttaacacacaagagttttatttgcagaattaatttttatgatgtttttacaatttgcctaaacctttcactttattttatttaattttaagacaatttattattcttcagcaaaatgtacatttttatgcctttttataatttttaactaaaaacactttttactgtttttatacaccttgcatgcaaatccatgtttagcagttttaattacatgttataatgataacttttagcaatttttaactttaaggtaaaatgtgttaagtttttttgtgtgtgacttgaaactaaaaacactgactcattttgtaatttgggcgaagtagctctgaaatataatgctgttttttcaattttaaacacttgggtaaaatcgcaaggtgagtgcttaggtagaaataagtaactactgaacaggtgggagcaaagtttagttgggcaatactctttatgataccgacatgtgaatgcttactagttttaaaagtgctggctttattgttgtagtcacagaggagtctaaaggcaaggctgggtagcttctggctcccacgttaacattatttatttagtatgccagatttttcttaaggtgcactagccactgaggatatttttgctggtgggaactgagattttctagacaggtaaattagctgccaattatggtttatcttagggacatgtttatagagatagtattcttacttagcttgcattctaaattttgttcccttattatcttgttaaagcgatgaatatgtttgtacaatgaagacaactttttttgcctttttaggttagagcttcagcatgagaattatacttcaacacagaaagttaggtctataagtgaaatataataaagtgttctgaaaagaaggagactaccttacaaccccaagagaaaaatatgcggcactaagccctggttccttttttccttattgttttgtcatttttttagaactttgggaactaaaatctttttgcttaaatgctgaatttataaattgaaacagactcttgggttttgttataaaggcaacgtaataatacttctatgtattttataggcttatatagtataataacttgaatttatggttggatttgactgaacctacgtagatactaatctgaatgactcatatacagaaaatgtgcagtattttaagtataaaaaattaaactggactagtttgcttttgttttatagtataaatgaaaatgacccaaactatttaattgtatgagcagaaattatgaatgaaagatgtattttagagctatatgacagaggggcattttaacttgaattccccagtggcaaaagtagtgtataaactaatgctagtgtatacactactgaagtgccaacttatgtaacatttttaaatttaatttttaaaatgaaagatttttttttcactgtgaagggcagtaacattaaattttcccagtgggtatgagtgaaygatttacttagtacattgatatacttaactattagcatttttgggaagctggatttgatacaaatttattttgaaaaacatggtttatgaaattttataataaaattattaataaagacattgttaagtttctataaacatgcactaaaagtggcaagacagagtggagaaatgtaattttggctgagaaaaaaacttttttcaggaaaacaagatttatgaagagaaaaacataaaggacttttgaatatactttcttggatatccattttaattaagctgagcactcttttttattaaaggtaagggtggattttggaattatataaatgttatgccaagttaaatgaaaggattgagttatrtgcaggaattccctgtgataatgagagggatttttagagaaagatcccagaagctgttctatctgccacaaatcagacatggagaaggggacatgaacgtgagcaatgcctttaaccctggccacttcccggagagggagaatggcaggggaggtttgactggttggagcagtttttgaaccggtggagaaggacgaggggtgcggtttaaagtagaagaaaccctgaatatggggaacctattgccagaatctctgagatacagctaaagcagtgttaagaggaaagtttctagcactaaatggcttcatcgagaagatagaaagatctcaaattaacaaactaacttcacctaaaggaactagaaaaaaagaacaaaccaaccccaaagccagtcaaagaaaagaagtaaaaattagagaactgaatgaaattgagatgcaaaaatccatacaaaagatcaatgaaatcaagagttggtttttcaaaaaaataaaaataaacaagatcattagaccactagctacattaacacacaaaaagagaagatccaaataagtatagtcaaaaatggcaaagatgacattacaaccaatccacagaaattagaaaagattcttagagaatactgtgaacaaatatatgcacacaaatgagaaaatctaaaggaaatggataaattcctagaaacacacaatctcccaagactaaagtaggaaaagattgaaatgctaaatagaccaatattgagctctgaaactgaatcagtaatgaaaacaactaccaaccaaggaaagctcagggccagatggattcacactgaattataccagacatacaaagaagtaatgacaccaatcctattgaaagtattacaaaaaaattgaaaaggaggggatcctacctgactcattctgtgaagccagcatctgcctaataccaaaatctggcagagacataacaaaaaaagaaaacttcaggccaatatcccygatgaacatagacacaaaaatcctcaacaaaatactagcaaaccaaatccagcagcacatcaaaaagttaatatactgtgcttaagtgggctttattcttgggatgcaaggctggtttaacatacacaaatcaataaatgtgattcaccacataaacagaattaaaagcaaaaactatatgatcatctcaatagatacagaaaaagctttggataaaatccaacatcccttccataagcgaaaaacaaataaccccattaaaaaatgggcaaaggacatgaacagacacttcccaaaaaaacacgtacaagcagccaacaaatgaggaacatttcaatatgttcctcatcactaattaaaatgaggaaaattttaatatgttcctcatcactaatcattagagaaatgcaaatcaaaatcacaatgagataccatcttacactggtcagaatggctattactaaaaagtcaataacagtgctggtgaggctatagagaaaacaacgcttatacactgttggtgggaatgtaaattagttcagccactgtggaagtttcttaaagaaaagtttagagatttcttaaagaacttagaactaccatccaacccagcaatcccattactgggtatatacccaaaggaaaatagatcattatatgaaaaagacacatgcgcttgtatgttcgtcgttrgactattcacaacagcagtgacagggaatcaacttaggtgcccaacaatggtggattggataaataaaatgtacatatacaccatggaatattacacaaccataaaaaggagtgaaagcatgtcttttgcagcaacatgggtggactagaggcygtaatcctaagtgaattaaggcataaacagaaaaccagatactgcacgttctcacttgtaagtgggagctcaacattgagcacacatgcacataaaatgggaacaacagacactgcagactgctagagggagtacgggaatgggttgaaaaaactccgttgggtactgtgcttactacctgggtgcaatatgttcatatatcaaacctgcacctgcaccccctgtttctaaaataaaagttgaaagaaagagaaagctacaccaaaacctgaataggacatttgttacaatgaagtatttgacacatcaatatttcttttcttcttttctgcctcaccctgccctgccccgccctaccttgccttgccttgccttttttttttgagacatagtctcactctgttgcccaggctggagtgcagtggtagggtctcagctcactctagcctagacctcccagactcaagtgattctcatgcctcagcctcccaagtagctgggactacaggcacgtactaccatgtccagctattgtttgtttttgcagagatggggtctcactatgttgcccaggatggtcttgaactcctggcctctagcaatctgcccacctcagcctcccaacgtgctggggttgcagtcatgagcgactgggactggttcatgtcaatatttcttacaagcatagatttaaaaacaaataaaatacyagctcttcaaattcagagatatatagaaaggttatacatcrtggtcaagtggtattcattccaagaatgcaaaggtggcttaacatttaaaaatcaatcattatgatccaccacaataaaataaaaatctcatgacctataggaagaacatttggtaaaagtcaactcyttgtcatgattggcagccagaaatatattaataagacaactttcataatatgctagtctatctaccaaaattccccaaagctaaccaatggtcaaatattgaatggtttcttcccaaggtcacaggaatgagacaggaactactatcaccatctgtattcaatattgtagtggatatattggcaagtgctataagaaagtaaatgaaatgaaagacttcaggattagaaagaaagaattaaaaccaacatcataacatgattttatacttagaaaaccacaaagaatctacacagtatgaaaatttatatgtgaagcaattaaggtgctagttaatacaacgtcaatgtacaaaatcaattgtatttctatatgctagcaacaaaaaagacaaaccaatttttaaaatgggtcaaaactcgaataaacattgctccaaagaaggtatacaaatggccaaaaagcacatgaaaagatgtttaacatcatgattcaataggaaaatacaaatcaaaaccacaatgaaataccacttcacaactactaggtagatcagctacaataaagctttaggttatgtatcttcaccactacaacaaaaaacatttttaagctatactaaatgcaaagatagacaaactgactaaaggttcaaagatagatgtgtacatgtgtgatccttttcaatgaagaaacgtcttttcagtaactagtgctgggttaattttatatgcagatggaaaaaaaattctggacttctaccttatattgtatgaaaaaatcagttccagagggattgcacatctaatgtaaaaggcaaaacaataaagatcttgaatgacaaggagaacatcttcatgaagttggagtaggcaaagattttttaaatagaatacaagaaccactaaacataaaggaaatgtttgataaaatgtactatattaagtttaagaacatctgttcatcaaaagacattatacgaggatgaaaaaggcaagccacagaattagggaagatattttccatacacatatctgacaaagagctcaaagtctagatgattaaaaaacaaaacagagcaacaatacaaaaaaactccttttcaataagaataaaaccacccaatggaaaaaaacagacaaaagatttgaagagatgattcccacaaaaggatatccaaatagccaagaaacaggaaaaggcattcgacttcattggtcatcagggaattgcaaattaaaccccaatgagacagctgtatttcatgttaggaaaagcgctaaaatgaagacacaagccaaagtggagagcacatggaagtggaaactaatacaaccactctggaaaactggcagcrtctgttaaagctggaaattttcacacctatgacccaggaattccaccctaagtacacacctgacagagatgtgtacatgtgtaccatgaagaccatgtgcaagtatctttgtagcatcctatttgtaatacctttaaactggtaactacccaaattccattaacaatagaatgaataaatgaactagaggtcatccacatatcaaaatactctgcagcaatgagaataaactcagtacaactacatgcaaccacaaagataatgttgagggagaaaatctacaaaacactgcatggttccatttatgtaaaatgaatacatataaaggggatatatatatatawcaagcgaaaccattcgatgctgttagaagtcccatcattcttggtgaatgtagtgactagaagaggctcaaagagttcctggagtttttctctttctggtggtgttgacagtggtgtgtttggtttgtgaaattcattgagctacacatctatgatttgtgcactttctgtatgtatgaagtacacattactttaataaaattttccaaaawaaaatcttattttsgtaaaaggacaatttaaagaactgtattaagtgaataatagttcaggttttacagatatgcgtgaggtgaatgaatgaccaatctttggagaatgtgcatgattagctaggcttcattctacacatcttccttagtggaatcccattccactttccaccaccttcatcctcaggcgcccccacgcaggccccttttctgttgcagctcagctggacagccccttcggcggggactccccttgctccttttgtgactcctggctcagaggaataagcctaatttgtaggctgaaagccatttgagagatgtggcatctttctcatgaacaagtgtgacttgaccraggccatagaactggttagttacagaaatatgctcaaatacatatcaaacatcttgacacccaacrttccatgccagtttggaaggtttcaaaaagaaatcccctaattctacaatccatttccagctcacctgctgtygcattgaatattctgacattagggatccattgggtcatgtgtacatgtttcatctggtctctcttacagtggcagtctcccctcagtggcctgccacccacagagccacagaggggactggggtagagcargccaggtgccatgaactgccctgtcttgaaccagggctggcttctctgagaccagcgatctctgtctaattgctgccttattccttctccaggtccttccaaccctcctgctaccatgaagattgcagtgattggacagagcctgtttggccaggaagtttactgccacctgaggaaggagggccacgaagtggtgggtgtgttcactgttccagacaaggatggaaaggccgaccccctgggtgagtgagccaatggagcagggaagctgatggagggcggcccgcccatccaggtagaagggaagcagtaggtgggagtctgggagcagaagtctgcagggcctgtgctctagctgggaggcagccataagtggtctaccttgaatcctgctccagtgccaacaggctgctgggcttttctggaataaattggagatcccctccccacctgatcatggggtggcattagggtcctggagragggctatagagaagcccagcctggtcccaggtcccacacagagcttctctgacccagcacccatgattgggaaggtctccatgttctgaactgggggtccatattctgaaaggtgggcatgcgcggcatcaccattgctggggctgccgtcaaaacacatagtgctctacttacccatcaggggagagaccatgatcacaaaggtggttttcccagggcgagtcttctccattgtactctggatgtgctgatccctgcaatttccccaaaggtgggaaactcgacttcataatttgtggtaatggggaactgcatttgcactctcccctggcattttgtaaaagaaaagaaaaaaacacagagagtactragcgcaccctgrgagtttcggattcagaatgaggtggaaaagtcagaattaggtgaaattgttaacctgggacaagttcctgggagatactggcatctcttgtactaggaaaagcacgttttgagaatcatgggtctgggtcactgcctttgagctgggaacctcagcagacaggatgcaggggcctcagcttggatgaacagaccctctaggaacactgactggtccttctcaggcctgatggagacagactgtggggcagggcttaaggatagagggccaggattaggaaagggggcttgtaggcctggccaggcacagaggtgtagtttgttaaggaaagccagtctccctcagtggggaagctgcagcctggccctagaatcaactccaacactcaacacccaatgccagccaggcttcagtcttggacctgaccacaagtgacccatgacataccctgaccccaccacagcctgggtcctacacccagccactaagtgaccactgaccccagctgctgaccctggacccagaccaggcctggctgggactcctacttggccttgatctcagatgtcctgaagcagtatttcattggtcactgtgggacagcttttgcaagtgcagtccaatctgctgacatcacatcccaccctctctcaaaactaccagacaccaggacagagtgacagaggaggagaccggagaggagagccagtccagtcagggcccaaacatcacaccagaggctctaacagagaactgaatacaaagaagtgttccttgggtattgaagagtggaaggcagagagcccaaagttattggggacagcgactgcaggaagcagctgccactgtaaggctaagataaaggaggacgctttaactataaaaacttgggagcttgggcctgtaatccagacctgtgaggagggtgtgctggtgacggggcaggaggaggggccctgcaggctgtatctggtcctctggggtgtgtgtgtgtgtgtgtgtgtgtgcacgcatgtgtgcatattgaggctagttctgcagatgatggaaaaactgatttagccattgctctgagaaggaacgactgtgactgggatgaagaagctgggctgggggaggctcacaggacaggaacccactggacagaaaggagtggggatgccctgttgcccttcttccccttcttcctccatcagggaacagctgacaaagcagaaatgccatctgcaggggggcagtccccatcacagagtgagcagtagagggggccggaagacagtaactcagtgacggggatggcaaggcctcaggagaggaatgagggcagaggtcagccatctgggttctggaagagggaggcactcagaggtcctggggttcagcaaaagtcaggatgcaggcagggcagtccccagagcctcatgcttggctggtgcatccgtctgtgttgcccagtggagcctggctggggtgtgggtgagggggcaggaatggagagaagtcctatgagctgctctgctgggaaggcagaggtggctgcgtgtgggtgggttatggagaggggccagtttcttatccaccgtcccacaggtctggaagctgagaaggatggagtgccggtattcaagtactcccggtggcgtgcaaaaggacaggctttgcctgatgtggtggcaaaataccaggctttgggggccgagctcaacgtcctgcccttctgcagccaattcatccccatggagataatcagtgccccccggcatggctccatcatctatcacccgtcactgctccctaggcacygaggggcctcggccatcaactggtgagatggggcaaaaacacagggggccatycccatacatgtccctccatcagcctgacttgtcactttccattagcccaaagcatttctagggctgcagagtgggcatcgtgcaggtgcctgtcctgtggctgccagatgtcagccacagaacaggctgtgcaacgttatcaatgagtgaaggctctagagcactgggagcaggtgttgctaagcwctctgcattcccacagttattggagaagctggcactgtcagtgttcccatcccccagctgagacagagagggcaccagaaggcgcagggacagagagggcaccaggaggcgcaggggccagggtgccaccccaggcggtgggctgggggtcctactctaacttccactgccgctgctctgggcagcacacttcgtagaaagagataaagatggagcaaaggatggcctccacaaggtactctgaggggacagaattcccaagacaacaaatggggtgacaaggcagatgggtggtcaaagagggaagacatttgagttgagaaaagagagtggatttgtagtcggactggtctgttgagattcaggctctctgatctttgtgggtgtcgcttcacttttctgggccttagtttccctatctgtaaaccgagtatacctgttatccctgctgtgaggactcagttacataaggcatatagagcttttagcacaattcctggcccatggttgttatcaatacatgctgttttccttcttccgtttcccgccggagccggtgtcagtcctacccctgggaagagagggcctcctggagggtggcaggtccacgggcctgtacccaggacatcctccgtggcccttcatcgtggactccaggtttcactcttctgcttcctaggaccctcattcacggagataagaaaggggggttttccatcttctgggcggatgatggtctggacaccggagacctgctgctgcagaaggagtgtgaggtgctcccggacgacaccgtgagcacgctgtacaaccgcttcctcttccctgaaggcatcaaagggatggtgaggacctggagccggccgcgccctgcccgccccgacgcaccctcaagcatcctccctagacccagcccaccgctcctggaggccaggaatctgttccccaaattcaggattctggagggagaggagctctcacttcaaggtttcagaggcaggattaggacaaacagtgtattgtattaggagggaatcttgctcacaacggacagaacccagctcaaaaagcgtttggcaaaaaggggacattttggggcccgttcaatagacaaggaaggctaaaggcagggactgggtcacaccctgctgaatccaggagcttcaattatgacatcgttaggattctatttctctctcyttcactcgttgattctccttttctctgtgtgatttgtttcattctcagtttggctgccctgaattagaggaaagatagccactatagctcaaggattctaattcttgattccagggaaagagaaacactttttctcctagaattcatcaatcacaaatcaggggagattctgattggccagcttgggggtcatgtgatcctcatgagccaatcaccagctggggtgatggagtgctctgataggctgtctcmgtcacatgcttcctgctgggaaggccgtgacctgtggtcacatggcctgagcggcrgggcggctcagtcacctgggcagctggtactgctgagaggcagggtggcaggctatgggccggagcccacagctgcaggaggggcccggggatcatatgtgagggctgcttgcccctgccsgaggacaggctggcagggacggccacaggcagaggtgctgtccaggcatgcagcaggagggaaggaggccctggggagcccttgctgtktgggcgcagcaggaagagcagctgcagtgtccactgtcccctcgtcctcctcagctcctggccactgccttttatttttcggttgtgttaaacttgtcttccccacagattgaccagctcacaaaaatagtgaacaaagtagagttgctggagatttagtggtacagagagggagcttacctgtgcttcccacggcaagcaactcaaatactccttgaagctgcactgtccaacaaggcagccactggtaacatgcagctattaaatcaattaaaatgaattatactgaaaaattcagttcctcagtctcagccacattctaagtcccctggccaccgtgttggaccgtgcagacttggaactcatccatcaccacagagggctccattgggcagccctgcctcagatgctctgacacccggtcacttcccattcttggcacctcccggtctcttccctcaggctcttgctcacrtgggcccagactccttggctctccttctccctctctgattcctttcccaccaccttcctctttcctgtcacagagaaacaacttcctgcttcatctcagacctccaaacttccaccttcaagcccaccacggggctcaggacccactctctttaaaggcagagaaggcttagacagcaacatggacatttgtgtctgtgttatacctgcagggctttacagtttatataatcatctaagatatcagaagatgtaagatctatgtaatctaaacctttgccaggtagagaggacgggtctgtgtccgttgtgcaatagaagttaggttcacgctgactcccttgttcatatggcaggtgtttcttgggtgactgctgtgtaccaggcaagtctggtcagtctggggaagggtccaggctcaatgtgggccctggggctgggaaggaggcarggtcctattgctggggatagcaacccactggatctccccaggtgcaggccgtgaggctgatcgctgagggcaaagcccccagactccctcagcctgaggaaggagccacctatgaggggattcagaagaaggagacagccaaggtgagtgctgggtccctccacaccctcatcctgcctgtgagcagactggggttgtagagggcagcctgaggaggctggggttcagcccagatgstgcaggttgtaattctttgaggccagaacacagggcagcccaggtcagggatgcatgaagagagccgtggaggaggaggaccctggcacctgggagggtagcgaacagggtccattccaggttctttcctgttcctctttaggaggaatgggcagacaaagcccacagggagataagagtgggagttagggggcaaaacgtcagccgtagtgcgagcagtcttcaaggcaaggtgtgagggacagtgcgggtctctggagcaatagccagtggaggagcctcagaagcctgtaggctgtgtctcagctcaggagtatgggttgctgtstggggacccacaggggccctgccagtgaaaggttgggccctatgggacgggcctgagtacattgtgctggggcctctgtgtaggrtctgggccatcttgacagcaacagaacattatcttccccaaaccattctgaagtctgctcagcccatgagagactgagggtcagagagcacccagaactaggggcaccagctcagggactcctgcaagtgtctaagaggaagctggggttaccagctgtctcacaagagcttggtccactgtccagatgtcatcagggtgggaggggagtgaggagagaccagctgagcacacacaccttgctccccacagatcaactgggaccagccggcagaggccattcacaactggatccgcgggaacgacaaggtgccgggagcctggacagaggcctgtgaacaggtgtgtccctgcatggctggaatccagccacgtgcattggtgtatcccactggccattaaactgtcacacatgtttgaactggttggtataataaatagctactgccctggcccctactcccactgggtgccccctaaacatcccagcctttccccaggagtgagagacctacccagcctgcagtagctaaaggatagatgtcctgcgtagctggaggcctccaggcccttgtagtgcccctggggcccagctgtattggtggtgaaatattttgagtctcaccactgggcttgcggagaccccagrcccagtactcactctgacttggcctcaggcagggtggagcagcacattcagggccaggctgaccgtgggcaggccagatgctgaagatggggagacttgggggtcacaggctctagtgaggcatcaggkgtggcgggactgtgtgtggtggactttgtgcaaaccttgagggcagtcttgtcccccacacagtctcagactctccagacccctgacccccagccgactgcccagactgtggccagaagcctctctgctgtcctcatcaacgcagagccctttgtactagcaaatgcatcttctgatcaaagcaaccactccttggcagcaccctgaaggcaggtagcctcattccgtgatgcctggagcacattctcccccagtctgtgcacctcaggtctgaggccatgggccaaggagaagggtcttatggcagagttgaggcagacctgccatcagctccctgaggccactgaggctcctccaggtcttgtttgtgccccaggagaaagggcctcaggggtcacatgggctttgagccrgctcccaggtctcagctacccctggcccctctccctctcccagccctgctcagacctgcctgggctactggcttcgggggcttcttctcacccaccatcttctgrtatttctccccttgacagaaactgacatttttcaactcaacgctgaacacttcaggccyggtgcccgagggagacgctttgcccatcccaggagcccatcggccaggggtggtcaccaaagcaggactcatcctctttgggaatgatgayaaaatggtaagggcayggctgtgggtcacttrcctgctcaaagccacccatgctcctgtccttggactcaggcctcacaggaagaccctaggctcctctggagaaaatggaaaaaaccagacccaggaaggaacactgaccctgatttgtccctgaccacccggctggtcctgagcacagggtgtccgaggcagtttacccacttctctgttctgggaaagctgggctccctacccttcctggctaggcacccatctccaggctgagtgccctgtgtgggtgtcaggcaacctagaatcagagagaagccytcccagggagcctgggttcagggcctctctttggtctatcagaaacacctctgggtgtggggtcattaagcctctgtgcctcagctcccatctctttgaacggcgatgccatggtaacttagcacgtgcagagccttgggagccatgccggccacctgctcttgttattagcagactacaactcacggtaccagcaaacactgatggagcaccttttataccagaacaatgtatatgcgttaaatttaatctgcctaacaacactatgagatatgtataaatattatatccttatagaggaaaaaaacagagatttaaataacttgtccaggatcatccaagctagcccgtggcagagctgggattcagactctgaaattctggctccaaagccgtgatgctggtcttggccatggtagcttcctgttcatatgcactctactactccttctcacatgagcagccgggggtagggagagggcaggcagggatcttcccacacactgacagggtccggacaaaccccatgggcgtggtacccccagccgtgttgctgtgtcyggcctaccagagtgaggcgtggcagtatggggcctggcctttgctcgctcttggtgtccagtctgccatgctcccctgtcagaaggtctaggctgctgttgatgtctgcaatgtagtrttttgggtatccaagattgatatatgcagttgcaagagaatatctgtctgtggtcaggttccctagaagcagcatctaaggtaaaaattcttgtgcaagtgatttattgagggaatgttccagaaaatcatgcsaggcagtaagggcagaggaaagcaaagcaaaagtaaaggttcaggagaagtctagcctggggctgctcccagggtgggttttggagtattaactgcaccctccaattatacctgcctgtccccacctctgtcagcctttggtttcagtggcccctggggtggggtggaggacccaccaggcataatccctcggcctctttgtgtacaggagctcttatccatccacagcaagcaaggatgggacagtgcaggccgttatcatccagcccttgctgcagctggaggacagggcaccagccacaggggtctgagcagggcacccacagcatctgyccagagacctgcaaagacaggaatgcaaagaaggcaaytaagtgtcttaagaggaagctggggttatcagctctctcacaagagctttgtccactgtccagaggtggtcagggtgggaggggagtgargagagaccagctgagcacacacaccctgctccccacagatcaacccagaagaccctgggttgaagcatctctcagccacgccctgtggagtctggctgggctttagcttgcmgaaagctccagaacatctttgaaaggcaatggggcgagggtcaggccgagaggcaagttccagttctggcagagcatgcatacagagtaccattcttacacagccactcttaacgcacagtgacatgcacccacccatgagcttatccataactctttttgtacatgtgttttttttcctggcccctaacaaaagcatttgttgaaaaactattgataaacaagcaggccccaaacaattcaaacatcttattaaatacagtaaatctgaggcagacactagagtagcccagagtcatgagctacaatgggggcagttcatgtctggcagccagaatccccttgaactgatggctggacgcaggctctacctgggaccagcttgaagtgctatcctgaagctgcagactgcagggccggccagaccctttttcagcctctcctcttcccacctctgtatcccacacaggcatctggtgatgttctccaggtgtttctgtggcagttctgggagctactgggtgattgcaagattagtttttttttctaagttgactttctatgtggtgcctgaatgacgttttctttttttgttcagtaggaatccttttttatagaagtaataaagtcattacacttaaaaacaaagtgaaagtgtggtgggagtgggtgatggaaaatcgagcagctggtaggggacacaagctctgcaattccctctgtgtccctggaatagtggcctccccactctgaactcatcactaatctgagactccctgcttcttcctcatctgaaggttggagacaaggctggagcgcccagcacagcaccccttgtgggacaccttcatcactgcctcaggtccgaccacaggaactgtgaaatccttccttttggccgggcgcagtggctcatgcctgtaatcccagmactttgggaggccaaggtggatggatcatgaggtcaggagttcgagaccagcctgaccaatgtggtgaaaccccgtctctactaaaaatacaaacaaaaattagtcgggcatggtggtgcgcgcctgtaatcccagctattcaggagggctgaggcaggagaatcgcttcaacccgggaggcggaggttgtagtgagccgagatcgcaccactgcactccagcctgggcaacagagcaagactctgtctcaaaaaaagaaaagaaaagaaaagaaatccttccttttgcagctgctggtgaagaatattcagctggaggatggcaaaatgatcctggcctcgaacttctttaagggggcagccagcagtgtccttgagctgacagaggcagagctggttactgcggaggctgtgcgggtaagaggcaacttcagggctgccatccagttgggcaggttgtgccgtgcacatgtgttctgcaaatcacactccccagagttgggcagcgccagccctctgtgggtgtctgttttggctccaggtgcagtgttggttctatctcgtcttggagctttctgttgtcttcttgctgctccttcctctgcaactggggccctgggatctggccagttcagtctgactcttctaggggctcattgtcaacacttaataagtgaaacagaagctcctggaatatttgaaagagtcaggtgtcaagcccatgtccctgtgattagaatgtgagcactggagccttccagaaaggctgcaccagaggcagcatcccgggctgtgaccaacacaagctgcccataaggcacacctggtctccaatccagctttgccccaatatgatgctgtagggagctttcgtctctaagactcagtcttctcaacatgaatttccatccatgctcacttcctggaatttgttcctgacccttcatgctccctcccactgtatccttcttccctgggtggagagaagagatctgggggaagaccttcaagagagaaggaacagcaaatggcaaggccctaacagggcagaggcctccctgtgttcagggagtcaccatgggagggcactgtagctggagcccagggggtgaggggcagagtcaggtgggcacagctggggaccttgggtgtyaacagcacatgtgcggcaaggctcagcaaggatggacatgaggcatttgtgtgatccaaaggtgctgagagccagcaacttccttcttgaaagtggaacaccttgaaggtctgtttwaaaaaaatcctatttattccaaagatatccctggagcagttgctctggccctgacttggcctgccctggtgttgcagggccagctggacagacagccctcctggagcccacagctgagtggctctggggatgagctggggtcatcgtttgtagatgtagacctgagtcaaacgatgctatcttacaacagctgcagccaagtcctgcatctgtaaaatgggaataacaagcccttcctcaatggaggattggtagaggagataacacacatgaagaggtttagttcagtagctggcatctttgaggaactcagtacacatcggcaatatgtctaagcatctcatgagaaaagcagatacttctggagtgtgtactgtggacaaaagttctcagaaaatgagtttggagaacagagactttattccagtgaccagtttgcaaaccgtccaaaggcagcttctggtgtaacaggaaggtgcattcctgagaacaacgggaagggtggggttttatagcaaaagctctcacccaggttcccatgcaaaggaagggttgaaaccagttctaattggttggtacagctgagccctgattggctggttcaggtgagctctgaaagactcaaagataaaaaggtgcaggttttaggggaacctagagtacatgtgtgaccccctagacagcaagtgtccacttggctctgttttaaatttaggcccagtttgctgctggggatccatcttgaaggattggctatttcaggtttgcatttgttcacygtgcacattcagagttccagatcctcctggaagagcggcgtgtttattcatgataacaactctatgcagtaggtgccctcagtacctgcaggtctcagctgtggagccaaggcctgaggagtggagtccgggctctggagggctgggctcaagtcctcctctagctsttcaccgtgcagccccctaaggccatcgctaggatggctatcattaggcctcttgctcacagctgcactcggcctccaggatgtatggtctggagaccgatgtgatagaggggacatggccaaaacgaggggaggccagtctggggctgtgcagctccccggtgttggtggaggggcctggcctgtggctgttcaggagaacrctccaagagcctgctgtgggctcggcaggtagtgggccacaaccccctatgccttcatgagctgaggctgggcagttgctgcccatggcagaaacgttgtgtttgctgactctccctgtagtccagactctctgcctgcctcacacacggaatccttacacagctgctgtcagcactgaggggctgcctgcattttcatggcttggtgggctttggctttgtggtgcactcagtgaccagtctgccgcactgcccctttgtggctccactctcatctgataagggccctggacgctagcaggtgccatccagtaggggacaactggtggccccaagcggtgtggtctgaggcaggtagatcctgccagtagagtagccagcaaaggttttggggaagaggtgacacaggaattggacccttaaggatgcccaggacttaaatattagctggggagtcaggggaaggtgtcgccagcaggtgagagcctagcagagacctcgaggggcaggcagcaggtgtgtggcagacagtgcgtggcttggtgtggtgttgatgctcgccctgaggatgggaagggcagatccatgacatttttccaagaaagaaagaggagagccgggggtgcttgtgccaggggttggggraactggttctgattgggcctggaccagcatctcatgcctcacccccaacctgggcccatgattgacaatggcctggagttcatccagagagtggggacctggcctgatattgctggggcccctcctgactcctgccccactgggcctcaccagcagcctgcccagagagcagtcatcccatcttgactgctggacagccttactgggtgccttagtgggagctgagcacccacatccacagggccagctggctgggcactgctgccctccataggtccsagactgaatccttcagaggacacagaccagttagcatcttggtgaggtcaagacccaggtctcctgaacccatctgtgagcctcatagtcaccttcaggcccaccctgtctccagcctgctgctacaacacccgggcatcggtgtcacactagggacaccagaacctgggcgctagcaccaaggtgagtgggggtcaggagcagctgggccccaccttcctagtccccagccatgcctagaggcctggcacatctgtcctccatcagctggactgtcatggggaccccagagaagcygggggttgaggtgaggtgggcatgaggacagcagccagcatcagagggccctgggatgtggcagctccttctttcccagaaggtggtcactccaggaccattaagcctcctgggatgaggcaacaacttggaggtacatagagaagcccagcctggccycaggccatccatgagtctgttcaggggttgttgtcctggagtggcacttgtccccagctcccctggggccagcctctcatcaggtcttgctttgcagagtktttggcagcggatcctccccaaagtcctggaggttgaagactccactgatttcttcaagtcaggggccgcgtctgtggacgttgtgaggtaaggccaggagtggaggggtcctgtcccaggtacttggtgctgtgtcacaaatctctgcaaaactgagcagcaggaaacaaccatttgttacactcatggatcatgtgggccagggacccaggaagggccagtgtgcaggtctgcgtgcacacatggtgggcagcacaaatgaatggttgcaggtctttatgcaaatgttaagggggcgtagttgcatgcagcctctctggggaagttctaggagggaatttgggaggagttgattcagaagaacagtactgagttcatagggagaattagggttatgtattgtgccaaccatttgtgctgtgcaacaaagcaccccaaaacattgagatttaaaccaacaccatatccttagctcacagtactatggttcgacagtttgtgctgggctcagctgatttgcatcagattcagctgctgtcagctgggctcacataagggcgggatctgccaggtcagctgggggctggctggtcctgtggtggtggtgggttccaggagggagagcgggagcccagggagggggtctcrgagtgagcacgttgtgttcattgcattctgttggccaaaatgagtcacagaacaggtccagcttccagggttggggaaagaaactccacatcttgctagcaggtgctgcaccttcacatggccaaggctgtgactgcaggggygggcattgtgaccagttttgcaattgaccatgcatatgagttggggctgagtgggctgagttgggcctatgtgcttggcactgtggacctctagtaactcactgtgaggcagtatgcagtttgtaataattgttttgtaaaaaatatgccaagaagaagaatgccagacacctgagagaatggtgtccagaggccaggccatgccttgtgtacagctaccgagctgaggatgcaaagaaagmaaaactgcttttctgtaaatagttaagagtatatgtccttttaaaaaaaatgtggcaaaaaaacacataatacaacatctaccttcttaaaattatarctgtatattgtaggattgttaactatgagcacagtgttggtcagcagatctttagaactttttctcgcacaactaaacctttctgtccgttgaacagccactccccatttccttctcccyagccccagcaacagccattctttttgctctgatgagcttggccactctagtacttcatacaagtggaatcatgcagcatttgtccttctgtgactggctttttaygcttagcatgatgtcctcaaaattcagcccttttgtagcacatggcaggactgccttctttttatggctgaatcctatttcattgtacagatagaccatattatctgctcatctgttgatggacatttgtgttgtttccacatcttggctgttgtgaatcaatgtggaagtgcatgggaatttgagatcagttcttttggacaaatacccagcagtgagattactgggtcatatgatarttcttcttttaattttttcaggaacctccatatcattctccacagaggctgcaccattttacattcccaccaacagtgcacaaaggttccatttttcccatatctttgccaatgcttactttcattcctatcttccttcctctccccttttcttctttccttttgaacaataaccatcccaacagtgatgagatggtatctcattgtagtttttattttcattttcctgatgattagtgatgttgagcatcttttcatatacctgttggtcatgtgtatgtcttctttggagaaatgtctattcaagtctttgcccatttttaaattggattatttgttttgtttgctattgagttgtaggaactccttatatgttttaggaattaacctcttatcagatacatggtttgcagaagttttctcgcattccatgctgattgtttcctttgctttgcagaagctttttactttgatgcatatgacttgtatatttttgcttttgtttccagttcttttggtgtgatattcaggaaatsattgcaaagaccaatgtcatggagactttcccctatgctttcttckagttttatagttttaagtcttaagtttttcatatattttgagttgaatatttttatgtgtggggcaagataaggatccgatttaattattttgcatgtggacatccaatctttccaacatcacttgttgaagggactatcgcttccccattatgtattcttggcacccttgttgaagattagttggccatatatgtttaggtttatttctaggctatcttgttcattggtctatatatctgtgtttatgccagtatcatactattttgattattgtagttttgtagtaaattttgaaatcaggaaatgtgagtcctctractttgttctttttcaggattgtttgaactattcacagtcccttgatagtccatatgattttaagatgatttttgtaatttctgcaaaaaatcacttgggattttaatagagttggcataaaaattgtacataactttgggcagtattgtcatcttaacaatattaacttctccagtccatgaacacagatggctttctatttatttagatcttctgtaatttttttcagcagtgttttgtagttttcattgtacaactctgttggctacttggttaaatttattcttattttattcttttgatgccattgtaaagggaattgttttattaatttcctttttggattgttcattgctaatttatggagttgcaactgtttttttgcatgttatttttgtatcctgcaattttgctgaattcctttattagctctaacagttttttggaggtgcagaatatttaargttttctttttctgttttttagacatggtcttgctctgtcacttaggctggaacagtggtttgatcatagcccaatgcagcctcaaattcttgggctcaagtgatcctcctgcctcagcctcctgagtagcaggactgcaggcatgcaccactacacctagctaacttaaaacaattttttttacagamaaagtcttgctatgttgcccgggctgattttgaactcctaggctcaagtgatcctcccacagtgcttgaattacagggtgaggcgttacacttggcccatttaaagatttctacatgtaagatcatgttatctgtgatgagatatgatttaacttcttccttcacaatttggattaatgtttctttcttgcctaattgccttggatggaacttccagtacagtagtctccccttatttgtggttttgctttctgaagtttaagttacccatggtcaatcatggttggaaaatattaagtggaaaagtccagaaataattcatacgtttttaaattgagagccatttgatagaatgatgaaatctcatgctgtcccgctccatcccacctgatacgtggatcacccctttgtccaggatatccatggtgtatgcactgcccacccattagtcacttagtagccactggtgttatcagaaaaaacatagaatatatagatggtcccagacttatgatgcttcaacttaggattttttgactttatgatggtgtgaacatgatacgaattcagtagaaattatgctttgtgtacccttacaaaattctgtttttcacattcagtacagtgttcaataaattgtatgagatactcaaaactttagtataaaataggctttgtgttagatgagtttcccaactgtaggttaatgtaaatgttctgagaacatttaaggtagcctaggctaagcgctgatgttcagtatgttaggtatattaaatgcattcatgatttaacattttcaatttataatgggtttttgggatgtaatcatatcataagtcaaggagcacagtgtaaggttcagccctatatgtggtttcaggcactcactgggagccttggaacaaccccaacccccgaccctgcccgtgggtaaggaggaactactatagtgtattgaatggaagtggtgaaagcaagcatcctcattttgctgctgatctcaggggaaaggctttcagtctttcaccactgagtatgttagctgtgggtttttcaaatatggcctttattatataaaggatgttcccttctattcttagtttgagtgctttttaatcatgaaaggatattgaattttgtcaaattctttttctgcattaaatgagatgaccatgtgtttttctcttcattccattaatgtggtatgttacactgattgattttcataggtgaagtatccttgcattccaagaattaatcccacttggtcatggtatgtaatattcttaaaatgctgctgaaatcaatttgctagtattttgttgaggatttttgcatcagtttccataagggatattggtctgtagctttcttttgctgtagtatctttgtctggctttggtctcagagtaaacgctggccttatggacagagttgaagatgtgttctcttctcagttttttggaagagtttgagaaaaattggtgttactttcccttcaaatgtttggtagaattcaccagtgaaatcattcagccctgggcttttctttactggaaagattttgattactgattcagtttccttactagttatatatctattcaaattttctgtttctccatgagtgagttttggtagattgtgtgtttctgggaatttgttcactttacctagttatcaaatctgttgccatataatttatcatgtattttcttatgatgctttttatttctgtaagattggtataatgtctccctttgatttctgattctagtaatttgagccttcactttttgtttcttggtcagtcagataaaggtttgttaattttgttgatattttcaagaaatctaaatttgattttgttgatttgctgtttttttttctggtctctatttcatttatctctgttctaatctttattattacttccttctgctagttttgggtttagattgctttttaatctcattccttaaggtgtacagtgtaggttactgatttgaggactttattcttttctaagtatgtatttacacctgtaaacttctttcttagcactactttccccgcctctcataagttttggtatgttgtgtttttattttcctttgactaaaggtattttctagtttctcgtgtgttcttctttgacccattaattgtttaagagtgtgctagctcattttcatatctttatggattttccagatttctttctgttatcgatttctagtctcattccattttgattaggaaagatattttgtaagagttcaatatttttacatgtgttaagacttattgtgtagcctaacaaatgatttatcatgaagaatgttccatgtaaccttgaaaagaatgtgtgctctgttcttcttgagcagtgttttgtacatatctgattggtttgtggtgttcaagtatcttattctcttgagttctatccatttttgaaagttgggcatctaagtagctaactactattgtagaaatgtccatttttgcttcatatattttagggctgtgttaggtgtgtatgaatttataattgttatatcctcttgcagcatcaaactttgtatcaatataatgtccttctttgtgtcttgtaaacttgttagatttaaagtctcttttatgttactatttgcatggaatattttctctatccttttacttccagctcttttgtatcattatatctaagtgattctcttgtagcatatgtatggatgctgggttttatccagtcatccaatttgtgccttctcatgtttaaactttaaatagattaaacaggagagtttaatccatttacatttaacttggttactaataaataaagatttatttctgccatttgttttctgaatgtcttatttttttgttcctcagtttctctatactgtccttttttgtatttggtaattttttttgtagtgtatcactttgattcccttctttcttttactgtatgtttttagttatttctgggttgttacttagggattacaattaacatcttaaatttataacaaggtagtttgaataatatcaacctagcttcaatagtatacaaacactctcattctatacatctcttttccttcccctttatagtgttactgtcacagtgtacatttttatacattgtatacccattaatatatatttaaaattattgttttatgcacttgcctattgtcatataggaaaaagagagaagttacaaaccacagtaaaatacaataatatggactttcatacttacctatgtagtggcctttacctgtgttctttatttttaattgtgtcatcaagtctatggtacttttatctcagcctgaaagactcttttcagcatttcttctagggcaggtctactggtaaccaatttcttcagcttttgtttctatagaaatatcttaatttctgtttcattcttgaaagatagttttgatggatatggaattcgttgttgccatttttccccaaaacttttaatatgttatccaactgctttctggcctttaaggtgttttagtggaagtcagcttttaatcttatcaaagacccattgtatataacaagccgtttctctcttgctactctccaaattatttatttgtctctgaatttcaacaagctgggtgtaatgtgccttggtgtggatctctttgatcctgcttggacttcattcattgtatgtcttagatgtgtatattcatttctttcctcaygtttgggaactttggggycactatttcttcaaatacatatttagagaaacctttttctcttttttcctctggagctcctgtgagtatgttggtrtgtttcatggtatcctataaatccttcaggctcttttcatttttcttcattcttttttctttctgcttctcagactggataatttcaagtttgctcatctttccttcagcctgctcaaaactactgttgaacctctttagtgagttttttgtttgtttcagttattctacttgccagctcaagaatttctatttgacttgttattatagtttctgtcacttcgatattctcattttgttcatacatcactttcttgatttcctttagttttttgtccataatttcctttrkctcattgaacatatttaaggcatttgacataatgtctttgaccaataattccgatatctgatcttcctcaggggtaccttcttcaaattattttttgttcctgtgaatgggctcttctttcctatttcttcatatgttttgtagatctttcttggtcataactggacattttgggtgttatgttgtggtaattcgggaaatatatttctcccacttattagggattattgaatcttccttgttgagggctagaactgtctgtttgtgacttttccaaattattttttgcaaggtgtgttccttattgtgtgttgtcgttgaactttctgttccattgttcctgcagtcagccagtgacctaacaaagatttccataaatgtctggctaccaaagtggagggaaagtattgccttttaaaatctcctagaagctacttcagcctgtgagggttgaaacaatgactgccagcctttgtgatagcttctcagcaatcaaaaggaatatcagtgctcaggacacaatgctggtggtcagaggacaaggtccttattgcccaccctggcttcagcaagctgcgtctggaatatgacccagccctgcttcaactttttgtggcagaggtgggaggtggggggtgrcagccaatatcttatgagaggctgaaaatcatttaaattgattgacatttaccagcttctttaccagtctttctccttggtgctgaaagcatttgactagaccccaaagttccaacatatttgattcatgtaagttccatagttatttagrtaaggggatacatttttggagcttcttgttctgccatctgctgtctagacattggcctttatttcttttggataaatacttgagagtgaaataggaagtatgtttaattctttagaaagtgctaaactgctttcyaaagtggtagcaccatttacatccctgccagcagtgtgtgcaagctccagttgctcagggtactacatctttcccaatagtgggaatggtcaggcttttaaattttagacattctaataaatatgaagctatattccattgtggttttaatttgcatttccccagtgcctaatgatgttgagtgtcttgtcatattcttatttgccgtccatakttctccttttgagaggcatctgttcaatcttttgctcatttttaattaggttgtttgctttcttagtattgagttttgagggttctttattctgaatacaagtcctttatcagataatgtgatttggaaacattttcttccaatctgtggcttatgttttcattcttttaacagagatttttggagattattattaatctgctaattattattattattagatgggttgtcgtatttactcatcgcaaaatagcagagcagctattattatttctgttttacaggtgaagaaattaaggcttagaggagttagtcatttgcccaaggtcacaaattagaaagtaatggagcgagaatttggacccgggaccatctgagtccacagcctgagcccttctccccagttctgggctcatggctacctcccggtgctgggatggagcctctctggggtgtttggccccactgccactgctgctagcgatgcaggcctgctgagcccctcccgtgtccccatctttccatctccttcctccaggctggtggaggaagtgaaggagctgtgtgatggcctggagttagaaaatgaagatgtgtacatggcatccaccttyggggacttcatccagctgttagtgaggaagctkcgaggggacgatgaggagggcgagtgcagcattgactacgtgagtgctgggccctccctgcagcaggccctgcagagccctcaggcagctgcatctatgactacataagacaagaggggaaacctggacattcagaaagccagggccccaggagcccacccttcagtttcccacactctccctgcacccgggatagcctggggatgtcagtacagtggggccagcttgccagaggatgttgctgtctgatgctcaggacatgggccaaactctgagtcccaaggcagktgatcaagatattaagaagagacttttagttcccactaaggaaacaaataatcctatacattcaacttgtgtgtatggaagtgtgacaagtaattgaaaatctgttttttaaggaaattaagaaatcttccttgagctatcttggtagactgccacctcccataagaatgggctttagcatagtttgtttggctggtagattggaacaaaagtgggtgaagtaaggggccaaggtggacctaagggtgtccttgggattgaggacaaatgactgacgaacagatttcaggaggaggatcatatcccagaggtgcctgggttcagggaggaattgccaatccacagggatgtgagtggtgggttgtagcatgtctggggcttgccaagggcttcactagccactggcattttcctctgtctgagtcctcttagcccaccctaaggaggctgaggagccagcccaaggtggcacagggagtaggtggaagcgcagagctcccgccaggcagcctggcctcagagcctgtcctttgtctctcccctgctcagctgttgcctacatgcagctctgaagccccaggaggcccctgggcagtgtgtgtgtgtgactgtgtggccatctgtgtatgcttcctgcaccctgcatgggtttgtgcttgtcactggggcctttctttcaggtggaaatggcagtgaacaagcgcactgtccgcatgccccaccagctcttcattgggggggmgttcgtggatgccgagggcgccaagacctctgagaccatcaatcccaccgatggaagtgtgagtgnaggcccagcaccccttctccacattccccagcctccstgtccttccttccctgcccccactggcctctgggggtcctgaccctgagagtctctgcttggacatgtgcctttgagagggacgggaaagaatgccaggtcgtttccagcccaccytactggagtggagtggagaggaggtgcagggtggtggcaggtggcaggagggctcggaagggtcttgcacctgcttcagagactgggaacagagttcctcctaccccaaggaagaaattaggccactgccacacttgcacacttcagcagtagccccagtgtgagactaccttgtctactacttgagccctccaccgttaggacattcttcttcgacctgagtcctgtgtttgccactccttcttgactgtgaccttgtggcatcatgagccaaagcacgcctatrgtagatacacacgtgaacatatccaaaacacaggtttcaaagcagggcttgcttttatggctgcatactgacatttttctatcctgtccatcctatagaattggccaagtccttgcagaagacagagagcacactcaaaatgagtcatttgagrggagttaatgaaagactcatctgcaaagggagagggarggggtagggacacagacaggacagtgcggtgcccttgggacggagcatcaggaggggctgaggatggggccttggcagaaggggcatggctgtcttgtggcggcagacaggaggcactggctttgccctccctgggctgccctcaccacaccccaccggctcccctcaccacacccagcaggcaccaaggtgagggagcctgcacggatggcacactcagggcaggaacagggtggggaccttggggtgtagacacacaaacagccctctcccagggccctgtcttcccttcctgtgtaaaccctcccagggttgtcctttggccatgcttctcctccacacctgctcatgtggacrggggccgcctcactggggccccaggaggaggccagggaagcaggcaggggtatctgtgtgcaactggcttagggagaacttgtcatggctctgcttccactataggtcatctgccaggtatccctggcccaagtcaccgacgtcgacaaggcagtggccgcagccaaggatgcctttgagaatggacggtgggggaagatcrgtgcgcgggaccggggccggctgatgtacaggtgggagcccaacatgtacctgccagccactgccaccatcagcttctggrcagtggcacggrggggacttctstggaggcccttttacctgccaggaggagctgggtcctggggaggctatgggaccgaggccatcagatgggccaggctggggctccttgcctgaggctcagaaaaggcttctcagaggaagggatatgagaaacaggagacatttcagcagagtgggctcaggggaggtgcctggtggaggtgaggaggtgcggaagccaagggatgcttccaaagtgggcgcaggctgggcctcccaggcagacaaagcacttccctcaccagcctgggctggaggggacttagctcctgcacgcagaagacagcaagggccagagaagggctggcctggtctctgcttgctcagccaggctctgactactggaatctataggtttcacattttctattaaaaaaaaaaaaaaaatttaagccagggagaaaggggccttctctccttagttccagttcagacgtcttaggcaaggacttatgatgactttagcttatgaccttagagtgagaggaaggcctggaagagaggtgctgtgcccctggaaccacagggcctggcgggaaggagcagtcaccctcacagaggtggagtgatgttcctgggagaagagagggtgcggccagatgagccgagaacacaggtgtcttggggcctggctctttcgctggggtcctgggaacgtctaggggtgcgaagccargttatggcgtggtcccaacgaagctcctcacctggcaggagagaccctgccttggccttgcggtcagaatggcttctgtttctgttatactccagaggccagaaaagccggggcagcccagcagcaggaaactagagagaggggttgcaagagcatggtctgcaaaaccgaatggagattagggttggggcagggagggctgtgggggtcgggcatgcccagcctttcataggttccagtccccttygcaagcccctcaattctagaaaggcactggccacgccaagtggtccctagagttcctggaggtcaggaagagctgtgaaacaagcacgacaggtggcgggagaacctctggcctgggccctgcgtgcgcgtttggtggaccgcacaaccaacagcgtgcgtggggtccctcccttggcctctgctgccatctggtggcttgtatcataacagattctactcacccataatgacagtgaggggggcaccctgggcagctgtaagtggaccccttcctgtcctatgcaaactctcaggccccgtgaagacctgggagtgcccattactggttctgcctcagctcagyacagcagaggctgggtctaggtgtcccggagggggcagttcaggagctcccagataaatggctgcagagcaccctgtcagggtggcgggaccaccgtgggtgttagggaacacgaaattcactgcaggaatcagacattacacaattgtggaagctaggaagaaggatccagagggagagttagacaaggttcctaggcagtcccctgaactcctggtagacaggatagaacctccagggagtaggagcagccgtatccagctgccaagtggggccacaaagaggagctcctgggaaagaccgtgggggagctgctggctctgcccagataccactgtggtccacggctgagaatctgacggtggtccaggctgctggtgktcagtagggcyggccgagcctgctgggcacccctgcatctgccctgcagaccttcagagggagatggcagcagcttcacttctcctgcactgctaccctggcacccagggactgggctctggggagcatgggtgccagggtgtgaattcagcagcctaactgaattracaatagaatagtcctgcaaggcagcctctcagagcttcccgaatagtgcactcgggtgatggatactttagaaagtgtgtcctgggaactggattgatgacacagccatgtcacacacaggtggaattatctagaaatgtgggggattcaaaggattggggctgatgaaggagaaggatgtgagcaggggaggcatggcacaccacaagctttagtgggctgcaggttgggtagggttgcaggagacgagcagtgagactgtcccaaggctgccgtgtgggcttccatgtccaggtgacaacacacagtgatgcagtgggagcctctgggtctgagggctgccaagggcagtagcagctttcaccttatcaccccaaggccctgttttatcaatgggcaacaactgctggttgaggttcctctgggtatgcaaagcagcgggccctaagtggctaaaaacgtacctgtttgggctactttaagcctaactgggagtgggaaaatttgagtttggtgccagcaggctttggagcaaatgggtctcatttatataacaaagaggcagctcctgtcttcgcagctggggagcctagtcctctatcggccgctaggtgatgttttcactatttgctgtacaaaatcggtttttctcaggaaccgatttacgcatgggctctccttgcccagggtggcctcgctcagttggttttatgtagcaaacctgagctgagtgcttcccagtgctgtgctggagctgggcgccgcagagagcagggaaccagacagcgccctgcctcctgcagcctggattccagtgggcaggcaaatcgtgatgaaattatcatctacctgaatgtctgttacaaactgtagtggtgggggagtgaagaaaggcagaggaggctatcagaggatgtgacagggagctctgatcagtcagaacatggttggggatttgggtcggcttcccattgagtccgtgtctgaaacaagtacagaaggcaaagaggagaaacaggagtgtggaaagggggcccagacatgcaacacagcccctaaaagccaaggcaggaggcctgactgacctgagcacctggaagaagccgatgtgaggaggaggagggaggcagaggagctggggtcttgtggccccagaatgaaatggaaatggccaggagctgcttggccaggcacagagttgcagatgcatcctgagtggcgtggacagctgtcacgggtcctggtgggtgtaggcaggtgaggaccggagcaggcctggggtgcatgtgggcttcgtggtgcctgggtgcagaggggagcagtgtgggaaacggctggcaggctttggtcccacacttgcctctgggcccgagctgccctgtctccaaggctgagtttgctctgggcctgtggtctccactttccctgtccaccctccccctaggggatgagaggggcaccctcataactcccaggctgcccacagctgcacatccgtcagaatcaagggagggcaacccgacctcggcatgctcaggctgaagccagtctgtgtaaacgygtcagcccccacgttgctccctagtcagcccttctgtgayggggatggggccacctctccacctctggagatgccaggctcaggagcatgcccccaccatcctggactgaacagttggtttattggtgctggaaagacagatggactttctcctggttcaagctttccgaagacaggaagggcagcctcttgggccacgaccccttcgctgtctgcagcaagtgggtgaatgcctctgcaggataatttcggaggaataggataaagtagtggatccacaaatacttcaggaaggaagcgagggaagatcsaggaaaggagagagggacagagggtgtcatcctcacagctatccggtggagtaaacggtgctggcccattgcatggatcagaaacggaggtcngcacatctnagagtggcagaactggggtagagggcaggaccccagctccttgaagaagggccttgtgaggncagatgaggccgtgccaggcctgagcccacctcccgcttcccctcaccctggncaggttggcagatctcatggagcagcaccaggaggagctggccaccattgaggccctggatgcgggtgccgtctacacgctggccctgaagacccacgtgggcatgtccatccagaccttccgctactttgctggctggtgtgacaagatccaggtggggcccaggctcccacccagtgtgagcacangcagactggcccagccatataggrgaactccaagggcagcacagtcatctgcatgctgcgcagcaaatgaccacaactggtggcttggaacaacacctgtttattagcttgtggtcctgcaggtgggaattccaggcaggctgggctgggttccatgccaaggtctcacaaggccaaagctaaggcgctggctggactgggccttatctggagactctgggacagaacctgcatccagacgagttckggtgttgacagagttcarttccgtgtggatgcagggctgaggccgcaggtccttcctggctgcaggtccctgctcagggcactgtatctcccagcggcagcaggtcactctcgggcttgggatccctgtgacactgtcttctgcctgcttttctgggggctcctgcagttattctgggctcatgggcactatgtccccaccttagggtcaacagggacagtcaacacctcayaggagggagtgtcaccatatcttcaggctcccgccatcagttgtggaacttgggggccatttgtagaggctccctggggaggtccacctctgcaggactcatggcgtctctgccagatcagatctgggctccatggttcctcctctccaccagggcatgacagcgacaagggaggtgggctgcctggtgcccgcccctactccgcagctgtgtagcttctggctgcagctggaccccccaaggcctgggccttctacatgtgctcaactgcttagagctgtggggagggggacacccrgccctgcccccaccctcaccctttcttgctcgaatgtcaaagctagaggctttgctggtaccaggaccagcttccacccaagggctctgcctgccaggctcagagtggagcaaacaccttgcccctctggctgcccccctgcctgtctctcaagcctcaggtcacacctaagctggtngctttgacttcctcctggagaccctggtggagacttgctgcctagaggggaaggggtgtggaccctgggcccctgggtgactgcccctgttcctcttccagggctccaccatccccatcaaccaggccagacccaaccgcaacctgaccttgaccaggaaggagcctgttgggtgagttcctgcccagggcgaggtgcagcctcgcngtgctttccatgcagtacacggaactgtagcacagcctgcgggagctcacagcaccctgtgcgtgcatttatcaaacagccatccrtgtgcttcttgagcacctgctccatgccaggcaytgttgtaaggayttgaggacaattgtatttaatctcccagtaacactggatcagtcaggtccasggtgggaaacaagagtaaacccaaaaaatgtccaaaatgggtatggtggtcagtgttcataaagatgaggaactcctgcacagcactgaggaacaggaaatatagaacaaaggaggaacaggcagaggacgagagcygctcagcaggaggagttcggaccccgctggatgccaagcatgtaggcgccgggaaatgaacctggcrtgaggcacctcacctcgccacccagtggccccagggcaggagtrgggagaagggcttggaacacagccaccgggctctgggttttccctgctagaggaaactgggcagtgacctctcgaggccatacatcctgatttggccccagtcctggtgagttactcacacgcgtgcctgaggaggcttacccaagagtgcatggccactgtgctwggccggtgacagcaaacaccagagcagcaggtgctggtgcagccctgatccatgatctgcactgaggatgcgcctgcaactggacctagagagccccagccctgggtccaccctcactgcgcctgcacgcggtgccacaggagagcctggccagggtgacctgggagcagggcccagctggcatgagcaccacagtcattcccacctgctctgtgccccttgcagggtaggggacctcacagctgtgggcatggccaaaggcccctcagctccacctgaatgttggagtatttgcaaggagaacgtgctccaatgtccctgtgtcactgacagctcatgcagatgaacaaccaactcctcaagcatgggctggaggaggctcctgtgggaaagtgggctgtggacccttagagccctagagaggagccaggctgcaggtggaggcatcgcctccagggtccccacagaggacatcgggcaaggtctgcacatggttttggttgtcccaacagagggggtgatagagtacagccccccacaacaaagaactgccccgccccaaatgtcagtagtgtgggagccaagaaaccctgctatggggcagtggtcagagacctttgtcgtgctttgaaaggggctgggctgggctgggctgggcagggcagggcgggtcgtggcccacctggggccacagttcagagccacacttgggtctttgaggctgcccacccctcccagctgccagcatggggttggggggtgtccacccccatcagactgaggaggaaacagacactgtgtcacccagaagcatccctatgtcaccctgtgaggctggccttggacccaggactctgggcgcctggtcagcaccccagtgtgaacacatcctgccctggggcctggtcccagcagctcacacagaccagggctcgcccaaaggcaggcaggcagggccactgctgaccacgcacctggtgggccgtgattctggaactaatggtctctgcctggcagggaggccgccaggacctctgggcttcacccctccccaccttcacaggggacctcrcctcagtgggaatgttctggagccggaacccaaggttggaatcccagctcctcccctttctagggcaagctcccagcctgtctgtactcagtctccccaactgtcaaatggtaataaaacagtcctgtcctcactgagttgtttggatgggtgagcatcaggtgtctagggcacagcatgctgtgaaggagttaggagggccaggtgaaggagccatgcagggccgggcctcctgggtaatgggrctaagaggagaattctgtatgtggttctgagaaggagcagagtccagctcttttggatgtttgtrttaggaaatttactagagaccatgtcactgctccactcggaatcctcgggtggcttcccagtgcccttgacatggaatcaaactyctcgcttggccatgcaatccgggcctggtatcctggccccctccccagtccactgtggttggctgtgctggcctcryggatcccaggccctccaccctcatgccccactgagcacttgcacctgtgtcccacctccagccctcaccagctgtcctccagctctcatctgtgatgcatccgycagacctctgctcccagcctgccctctctaatctataatctcattttattctctgtgtgagcattcagactgatgctgccctgtgcccatgcctgtcatcatcccagcacacctgcagtgtcccataaatactgcagaatgactgagtgatcagasctagagagccccagccccgggtccaccctcactgtgcctgcacgcggtgccagaggagggcctggccagggtaaggggctgcccatctcctcccctggccagtgccaccgcaacctcagcagtgaggctgcagctgcctcgtggggagccccttcccctcatgtcttcagccgcaccctggcccaacagccactcgagctccctagtgagccaagcatttcttggggayaccaagaaaccttgcttggtgtcccctgcccaggctccatgctcccgagagagagaaggaactccaccctcaccgtccaygcagctccccaggagygtcagagggcagaggagggggctcagggccgcacagcaggagaatggccccaagggagggagggacgggcctaagaaccatggggtggttgtctcactggatgtccactcagtctcccactaagaaagcccactaggaattagaggcagcaaggctaatgaaagtcggttttcacagcagctgggcagggaggattcacctgggcctgggtcctgcagccctgctcctttgaccccgtgccagggccagctctgcacactccagtcccggggctcrgcctttcccctaaccagtgagtgtgggcgtcagttcgggctgctgtagaagagaccaccaatccagggcctaatcaatggaaactcgtctcctggttctgggagctggaaatctgaggtcagatgtgggcagagctgtttccacatgagggctgtgagggtctgtcctgacctctcttctggcatctggtggctgctggtgacctctggccttccttggcttgcagggagaccccgtctctgcctcatgccctcttggcattcccactgtgagtctgtctctccatgtggtgttctttgtatgaggacagcattcctcctaaattaggggcccgcccaccccagtgctaccacatcctaattaattacaacacagcaatctggtctccaagcaagggcatgccattagactctggagattagggcttcagcatacgaattggggagtgggggcacaattcagcacataattgtggggcttttctgatgtgttttcttttccgagctcccctcagccccgttcactgtaaccgacggcttcacctgctccctgggaacactcagcagcccgtgctgtgctcccaatctcctgggtgtgtgtgggggtgtggggcagctcccctatctcagtgctccctgctgctcccccctgatgcctcacacgggtcctgcccaccgcctgtgtctggctaagcagctttcttttggggaaacacccagtgatggtggtggggtggcgacaggagcctgtgcgtggtctacggggctctgtgtggatgtcctcatctgactgtccagcgctcaaccaaagtggtgctgtatggggggaaggcagggccacacaggattcatacccggccagtgtgcctgctggtccctgggactctgcggcctccccagtgcccacggtgctctgagtatgaggcacctgtgcctggccagaggctcgctctagaacccagggtggcactgacactgggcaccatggcttcacacagagcaccctgacttcatcagtgctgccttgctgactctgtcttctcttcttgaggattgacacctggcctcacactctggaggaccctctccaggccctcctgacccacccctggtgacccctgaccctctttagctgaccctggcctgtgtcctcacctgtgcctgcctgccatcaccctctctcattgcctgtgccccagacagttccacagcttccatcagaaatggtccagtatcccatgccatcctgccctgctaggaagaggggctgctgccagaccaattcttactgtagcatccaggacagaaacagcaggygtgagctgcctctcagagggaccttgggtgccttatcaggaagcctggctttgagagtggatgtcaggccctgggtgaggtggagggaattggcaggtccactgtgggcctggtggagaagaaggacaaaggccaacctcttttgtgtggcagggtttgtggcatcatcatcccctggaactatcccctgatgatgctgtcctggaagacagctgcctgcctggctgccgggaacacagtggtgatcaagcctgctcaggtgagcgtgggttcactctggacagggcctgcaggccacagagaggatcaggaactcactctrtaagggaggaagggaagggcctctcttggccacacgggcactggaagaagggtcctgctaatgccagctgccctccatgggccccactctcagtgggcagaggcgtatgtggcaggcagagctctccaaagcagactcttttwcagccatggctgcttgaggccatctggctgtgctggaacttgcagctgctcgggtgagcagaggcagggatttctgcactctggattcatggggcagaaaccaggccccatgctctaagacagcctgagtagtctatccataaagctggtgccatgtcccttatgtggcttccaagaccagaagtcctggagagaagcagggtgagcggtgggattcgtggtccccatccctgcacacagaagctacgcagtgtggtgtctgagaggtgtaggtgggggagtagaggcgggatgtcaggggtcacccaggcatgctgggaaggtccttgggagtgaggacacacccagtgagcctcagtttctccatctgtacattggcaatgacagcctgcccgctgcctgcctcccaggatggtgcatgacatggcagggatggtgtgcccaggagggcacccactcgccagcttctttggggtaatttcgcggcaagggcattgatgtaatgaaaaacaataatgatggctgacattgatagtatttaccctgagtcaggcatgcctcaagcatttcaacatgtatcacaaattaggtagtaatttacatacatttgcttatttaagcatcacacacaaccctctgaggagaccttaacctctggctttagaaacttatgctgtgcagaagggaacccaggcctggccggctggagccctgccaggaggagaagctagggcaccagatgttggcccaccctgattcccagctggtgctgtgggcgcaccggctgggcaggcagggccccctctggtggctttcctggggtcttcctggtgccacaatctgcagctactcctcccagcttgctgctgggctgctgggagaggaaggcggggagggaaggcagagccccactttcaaaaacctccttacccagtctcctttcctggccccacacccaggtgaccccactcacagccttgaagtttgcagagctgacattaaaggccggcattcccaaaggtgtggttaacgtcctcccaggatctggtaagagccattgtcgggggcagggctagggcttctggcagctggagatgccattgggcagagcaggccctactggatagtggcgtgagggcagagtagcctggggagagcccaggcgggggccagcctgtgacaaaggaggcccctcccatgggggagagcacctgcacctggaagggctttcgtcttcagatgccccagctgaatgtattccagtgtgtgtgtgtgtgtgtgtgtgtgtgtgtgtgtgtgtccgcgcgccctggaataaacttgttacttggggattttctgcccttggaagtttgagagaatttttctttagaacatttcaggcttaaagcatttagggaggtcatacatgaatcactttttaagtttytgttgtgtttagtkgtctagtttatggaaaagtctcttcttgtgcagatttcaaatgtattagcatgaagttgtatataataatctcataatttttatctcctttttggattttccttttgattgttgtaatacattctttatatttttcctttttctctctctttttaagttgattaaattggtgaaaagttattgcttgtttgtctccatcctccactctaaaaaaatcaaatacagctcctggatttccttaccttttccatggctatttttatagtttcccccttgcttttattattcccttgtgtgttctcctgagtggttcttctatttttttttttttttttttgcagctttttgggttgaaartttagttcagtttttttctrgttcaaataaggaaagcatttgaaaaagttttggtgatggccaggcgcagtggctcacacctgtaatcccagcactttgggaggccgaggtgagtggatcacctgaggtcaggaattcaagaccagcctggccaacatggtgaaaccccgtctctattaaaaatacaaaaattagctgggcatggtggcaggcgcttgtaaccccagctactctggaggctgaggcagaagaatcgcctgaacctgggaggtggagtttgcagtgatccgagatcgtgccactgcacttcagcctgggtaacagagcgagactctgtctcaaaaaaaaaaaaaagagttttggtgatacctcacaccttgtgactgacacttttatcattcattataaatgcccctgtttatctttcacgatcgtttttgtgttaaagtcaattctgtcttagtattactacactggctttcaaatggttgctgttgacatgatatatatttttacatttttttactttcaacccattcatacttttgaatctaaaatgtgcctccatatataacatatagtcagatcttgttttttatccagtctcataatctctgccttttgactggagactttacattaaatattgatacagtgggtttaccattttacttttcattttctatgaatctcctgtcttttttccctctgtttctcctgctgtactactttcttttgcattaagcaaatatttcctagcataacattttaatgctttcartaattattttcagtatacatttttagttattttcttagtggttactctargacttatcatatacttatcaaaatcaacttcagatttatacgaacttaatcccagtgaaatgtacaaatgttacttctggataggtctgttatcttctccctgtttgtgctaggatcatgtatttttgtacacatataacatctatatatgttacaaacccaataatatattgctatatatattacttaattttacacctactaaagaagttgagaaaagaaaggagaacaagtccctatgtgcagagtttatatgttatctgactcacaagttctggtcctcttcagctggtcctatggatttgagctactatctggtgtcatttccttactccatttaagttttattcccacctacctcctttctgcttttattgtccaatatgttagatttctatttgttaccccacaattatacaattatgtatataatcattttacacaatcgctttttaaatcagttaagaaagcaaataaaatatgcattgatactgtattttataattacctaattacctttacagtgctccttgctttttcctgtggattctgactactgtctgtagtcacttgccttcagcttgaagaacttcttttagtatttcctgtaaggtgggtctgctaacaacagatgatctgtttttgtttatctggcaatatccttatttgcctctgctttttgaaacacagtattgctagatgtaagattctgggttgacactcttgttctttctttgcacttgttctgccttgcagtttgaatacagtcatgtactgtcttctccatctggcacacctgaggtagagtcttccccttatgagtgcggtctgggtggaggaaagggccccagcatcttagccatagtcaccaagaacttagcttctgcaactgagagttggcagaaatgagagggcttggtggcctgcacctcctggtggatgccagcttccttcgctgggagctgagaaggaaagaagcgctgccttcctggccacacctgcctggagtggagcttccctcaaggggagggagcagactgtgccttcagtgctacagatattccctgctcttactgagagtcagattttcttgaagaatgtttctccatttgtcgtatgcccttagaagaatttccagggagtttaagtggttgtttttagatcatcttcaccaggatagtggtttccctggggaattgtccgcagggctcctcaagctggccttccagaaatgcactcctgcctcatgccttttgagcaggttgtgttcatgtttttattactcttaaatatcatatagttgtagttttggtcttctctctaacccagtaagtaaaaagagatttaaaaacaattgccaagttgtttttttgtctaaaatttaaaattccgttcttatatttctaattgtattatgtcatgatcagagactatggcctgtatgtgagtttgccagggctgctgtcaccaagcactgcaaaccgagtggcataaaccactgcaaggcagcgccgcgcagctctggaggctacgagtctggatggaaggtgttagcagggccatgctccgtctaaaaggttctagggaagactaattctttgcctcctcctagcttgtagaagcatcatcccgatctgtgctttcatcttgacacggcatttccctgaagatgtggtgtctgtgcccaaatctcccatttttataagaacactggtcattttggatcagggcccaccccagtgacctcatcttaactaattttacctgtactgacttcatccccaaataaggccacattgtgaggtactgggggttaggatggtgacctatgaatttctagtgagtggttgggggaggcacagtccaacacataacagcttgtaaaaattttgttttctaaaatggagaattttcgtggtctgatatatgatacctttttgcaaatatttcttaaatagcctaagagagtgttgttatttttattactattattattattactagtaaatagacttgattttagagcagttttaggttgatagcaaaattgagcagaaagtacagagtccctatacaccacctgcccccacacagacacagccctccactactaatatccagcaccagaggagtatgtttgttacaaacaatgacctacattgacacctcattatcccccgaagtccgtagtttaggggtcactcttgggttgtacattccatgggttttgacaactgtgtaatcccttgcatctaccattagagtgtaacacagagtagtttcactgctgtgctataccttttatctcttcctctgtctaatccctggcaaccagtgatctttttcttgtctccatcgttatgccttttccagaatgtcatgtaattgcaatcatatgcgggcttttcatttggcttctttcacttatgatatgtatttgaggttcttccatggcttcttgtgacttaatagctcatttcttgttagcactgaataatttcccttgtctgattcacgtcagttacttatccatccactttctgaaggacgtcttggtaacttccaagttttggcaattctgagtaaagctgccgtaaacattcgtgtgcaggttttggtgtggacgtaagttgtcaactccttcgggtaaatatcaaggagcacagttgctggatcatatggtaacagtgcatttggtttttaaactgactgctaaactgtcttcccgactggctgtgccattttgcgttcccgcagcaatgactgagagttcctgttgctccacatccatcccagcatctggcatcatcagtgttgtggatttttgttgtttagtagctgtgcagtggtatctcattgctgttttagtcttttattctctaatgacaaatgacattgcgcactgtttcaggtgcttacttgccatctgtctgtcttctttggtgatgtgtctatttctgtcttttgcccagtttttagtggttgtttgttttcttattgttgagttttgagagttctttgtatattttggacacctgttctttgtcagatatatcttttgcaaacgttttctccccaaaacagtgatttaatggggagtggtggaatggagttagtatcaaaatcactggtagagctttaactgtatatagagggaggatacaagggtcttattccaaacctgccaaactggaaccttcatgggcgtgcctgggcatgtgaattttacaagcctggaggcaggggagtggtggaagatggagggactggayaggtgcaggagctctggactgagcgagtcatgggatggaaaagggaggtgtcaagaatgactcttgggttcttggattgaaccaaatggctgccaggagaagttgtttactgaaatggagaaccctggaggaagagcaggtctaggtgaacgattaagagttcagtttcaaatatgttgaatttgagaagccagaagacatccaagtgcagatgccaagcaggcagaggagtgaccaatggatctgaatcccagaggagyttggctggagaggccgatttggttggggggtgacatacctgaagatggcccttggaagcctgtgagatcagctgagcacgcaatgtaagctgaggagagaagagggcctggtacagagccagaggtgctgggtattttaaggttaggtgagaaaggagatggaaaaagagccgtcagagaagtaagagtcgaattaggagggtgcagagtcagaagccaaaacaagataatggcttaagtggggagctacgctgagtctgggaggaggcagygtcagggagcccactctgaagtctcgttgagatggagacctgagggacagagaggacttagccagrttggggacagggtttrtgcagggcgtggctcggagtaggggctgggggcgtgggacggggcaggaatcacggcattccctgggaggaacagcaggtggcaaggcctctgtggctggctcacctgagggcgggtgttttggagtctatgatgcttaggatgccacatcctcggggacctgatcaggcatccttgggtctctgttcgagcccctgcaagagctgaaggtttggtgccctcaccttggggtctgcctgatggtgaaaagccatgtggggagtgggttgatttgcttgggctaccatgtcaaagctccgcagactggggcttcagaaacagatggttatcatctctcagttctggaggctggaagtccaagatcagggtgtcagcagcgtcagcttctcctgcagcctctctcctgggcttgcagacggctctccaccctctatgtcctcgcatggtcattgcccaaatctcctcttcttagaaggacaccagtcagattggattarggtccatctcaatgacctcattttgccttaatcacctatgtaaaggccacatctccaaacacagtcccattcagaggtacaggggatgagggtttcagcatttgaattttaggggacacagttcagcccctaatagggagcgaggctccatgagccccaggcaccatggggatcaagcatgtggggagcattttgagggcctcagacccccagtgaacctgtgcagtcctggaggtgggctcctgcctccccagcaccagggggaccactctgattcccccctccctcccgcccacaggctccctggtcggccagagactctcagaccatcctgatgtgaggaaaatcgggttcacaggctccacagaggtgggcaagcacatcatgaaaaggtgcgtggctgggggtggagcagaggaggggctgctgtgggctgcgcctgggacatggcagtgctgtcccaggagctgtgtcctgcttcccaggctccagggcacagccacttccgtggccctgctgggctctatgcaaacgctgaagaggcatctgcctttctggcaaagccccggggaggcctgggcggagacctgtggagccctgtcagaccagcaaggggctggatcgagaggtgctgagagtataaaacacgcatggatttcaagaactgagcacccacaaaaaagtgaaatagctcattaataggatgtttggggtttttttttgttttgttgttgtttttttttttgagacagggtcttgatctgtcactcatggtggagtgcagtggcaccatcatagctcactgtagccttgacttcctgggctcaagtgatgctcctcagcctcccaagtagctgggactacaggcatgcaccaccaagcccagctaattttttgtgtttttcatagagatggggtctcatggtgttgcccagactggtctcaaactcctgggctcaagcaatccacctgactcggcctcccatctccgtgctgggatgactgacgtgagccactgtgctctgccttcattaagtttttatattgatttcaagttgaaatgataatattcttgattagttgggttaaataaaatataataaaatatactattaggattaatttcacctgcttctyttcaggttttttttttttttcaatggagtctcacagtgtcacccaggctggagtgcagtgtcgtgatcatggctgcagcctctgcctccctggctcatgcgatcctcccaccttagcctcctgagtagctgggactacagacacgtgccaccatacctggataagtttttaaattttttgtagagatggggttttgctatgttgcccagcctggtctcgaactcctttaatgtggctaccatcaaaaaaagtcccattgtctatgtggctactgtttgaagctttcattctatttctatggacagaagtgatctaggtcaactcatgtcttcatccttggactttggcctcaaattgactggtgtcatctcccagactctgtcactaaaccacaatatgacctgggccacacccatgccttgggtcccccaccagttccattacagcagtttgatagtgcaggggttctggtctccatcactgacaagctgggagagccagccagggccagaccacaggtggagccctgactgacactggagcctgccccagccctgacactgaacttctgggggtgggttttggcacctgcactttgagtgacgtgggtaggggaatggggtaactgcaagtagtcactgcaggtttgcctctcctaattcaaaagctagctggtctcttcctctgaggtgtgtaggttgtagccatgtctgagcacatgtgagtcaagtccagggtgagggctcaggaaatgtcagctctgagcactccagagctggacagagggtttggggggcaagatatgttgatctgcctcaccatggtaaccattttaccatcaatatgtagttcatgctataaccaggcatgtggtggcacgtgcctgtagtcccagctactcgggaggctgaggtggaagaagcctgggacacggaagctaaatgagccgagatcacgcactgcactccagcctgggcaacaaagaaagcctggctcaaataaataaataaataaatagaacagaacaaaaaaaaaagtacctcaatttgaacattttatttaaaaaaataaatactaggctgggcatggtggctcacacctggaatcccagcactttggggagactgaggccagctggtcacttgaggccaggagtttgagaccaccctggccaacatggtgaaaccccatctctacaaaaaatacaaaaaaaaaaaaaaatagccaggtgtggtggtatatgcctatattcccagctactctagaggctgaggcaggagaatcgcttgaatccggaaggcggaggttacagtaagctgagatcacaccactgtactccagcctgggcaacagagtgtgactctatctcaaaggaaaaaaaaaaaggctgggtgctgtggctcatgcctgtaatcccagcattttgggaggccgaggtgggcagatcacctgaggtcaggagttcaagaccagcctgaccaacatggtgaaaccccgtccctactgaaaatacaaaaattagccgggcgtggtggcacgtgcctgtaatcccagctactcgggaggctgaggtagaagaatcgcttgaacccgggaggtggaggttgcatgagccaagatcatgccattgcaccccagccggggtgacaagagtgagactccatctaaaaacaaaacaaaacaaaacaaaacaaacaaacaaaactaaaaaacgaaatcatgctatgaacctcaaatatacacagtaaaatttattaaaaaaaaaaaaaaagaagagcaaagcagagctctgagcagcttcctgccccagcatccctggttctgctgctttcttcttcccaggcagccgtgtcacacagacctgcagctgagatgggtgccatctccctgggttgcttctgcagaggaggcctctcctccccagtrgagcctcctacctgccggctattgactgagtgtccagctgaggacagcatccctgcagtgcatttcttgcccactgatgtgatgtgttcatgactcccagcctctctgtttgctctgccactaatacaaggaggtgccccagcctctgggcccctgcagctgtgccagcggatggtgctgttttgtattccttaatttgtgcagcaccagctgcgtgcaggcactgtgcttggcaccggggctgtaataggacccagacagatgcgtgcctgccctggccaggctcatgctctgcaggtggggtcagaggtcaacatgcagtagaggaaaggacagcagatggggtgcacaggcaggctgtggttttatacggggcgatcagggaggcaccccagagaagggaacacaggcctgcaggaaatgaggtgtggagtgggcagcaggaagggcagtccagggggcagtggggcacaggcctggtgtgtacaggccagaaaggaaaggcaggtggccgtgtgaagccgcaaggggtgggggggagtggggaggcactggccgggtcttgcttcttgcagcaaagcatgctttgggcctacccaggtccctgccacctggggtcccaatgcccctacctgccctggagggaccggccccaccagccctctgttccttgcagctgtgccataagtaacgtgaagaaggtgtccctggaactgggcgggaagtcacccctcatcatctttgctgactgtgacctcaacaaggctgtgcagatggtgagggccgggcctggagggggcagggacagtgagcgggaacagggactgtagggaccaggaggccctgtctctgattccacagccacactcacacgtgtagccctggtggagtccatagcgtcatcacaagcatagcrtggcaggcagcaggcttagggaagaatgacgtgtgccctccaaacatacttcccaagaagtttcatagctgccaggatagctgagatcaactgcctataacatatgtgtgtgtgtgtattacatataaatatgaaattgggaaacacacgccacagctccatctgttctgaaataaacattgcagccttttctgtctgatgagagggcaaatcagatgtgttgatctgcttcactatggtaaccattttaccatctatatgtaatccataacttcatgctgtaaacctcaaatatacacaataaaatgtgtgtttttaaaataaaagagcaaagcagaactctgagcacttgggcccagccctgctgacagtgaccctctaccggtggccgtgggtgcagtgcctggctccaccactgacttagtgggcagccttgagcaagttacctaacctctgtggcgtctgtgctcccacctgtggatagggaccatggtgatacccacctcccgggtggctgcagaatgaatatgtctgaagggcttaggttagtggcaagtgccacttgagacatgtgtcagtccttgttctcaccattagtattgttgttgccttggtcctgtcctgactcctgtgggagcaaaccagtaagaccatgttcagccaggtccccaaatatgcccccggccctatctaagttccactgtgccgtggagggtggcctaacaccctagcttgggtgtgaaagggagtccaacctcatttggtggagaaactgagggaggcaagggccttgttcacgggcccgggtgaacccatcagcacggggatctagctgggccctgtgctgagctggaggtcggggccctgtcattggctgtgcagtcccaggttccaggagagccaggcttgaccatggctctccgtcctcccctgggtctcccacagcaggcgagtttgaaaaagcaggctgcctggggcctctgagggcctttgttctggactcctgccaggagttccctgggccagggctgccccacctctcacccacccatgtcggggctgcctgcctgtgtcccaccctctgccctgtcacccaccgcctgctccatgcttacacacacggctggcatctctcctgtcagctcccaagagtgtagactctgaaacaggagtcggcacctcctgggccgccccagtgagccacccagggtgcaggagggtctcaggcaggccaaggctcactcccacttggtccccatgctctgcagtgtggatggcagccttatcctccagtggtgggagttggggcgtggtgtctctctgtcactgcatgggcctcagcgtcttcacttcccacacagttacctctcayctctcctcttgaggtgactgaggattgagtggggcccacaggaggagatcaggacacatgggtgcctcctttcctaattagaagaggcrgctgggccctggcagagccgggggctggtgtcccaggaggagcagtgacctggtgttcttgtccattctctgaaggggatgagttctgttttcttcaacaaaggagagaattgcattgcagcaggccgactctttgtggaggactccattcatgatgagttcgtgcggagagtggtaagtcctgccccagggtctgcgggcggctggttcactgggacagcagcgcctggctggagggggttggaggaggggagacagggcagggtcaagtgaggctgggctcctcctggaggacactccccccgggggtcagggaacccacagcgggagctgtgctgagtcttcactggattttattatttcaccaagaaatagcagacctgtagcaaaactgacatcaccaaaaagggcccatcttgggttggtcccctagaaatagagcctggggcaagaattcagtgcaggtgatttactcagagtggactcttgggtgaagcctggaaagagaagagaccaggggaggactggacagaatggagcaagagcctggtctcaggtcagcctgggcctgamcatggacaggggccctggagcacgaatccccctacacaggcatacccctggagccaagtggccaggctgtgggcccctgtggcaggtaggcttggctgtgggccgccagcaggggagagtagctcccgtcaggctctgcagccaccttgcatggcctcggggatctggtgggcacaggacagtgtctcccaccagatttatccactcarccacacctggaagagcaggcttgatgctggcctcgggacagatgggccatcctgagtccccttgggaggtttgtaatgcctggcttctcagttcctcagcgggttggcttcatcctctccaagcagctcggatatggtgggagtatggggctgatggcaccagcattaccttctcaccacatggtgccagagtgggacatgactccttcctcaccacctctgttagaaaacactgtggggttgacacgagccaggcctcagccatccttcatccaggccatgataccagggggggagcaagctgaggttggcttagcttccgcgaagagcaccgccccccaccgcccctaggttgtggagagcagcatctaatcccagtggatagyggcagggatgcgggagaaacagccagcaaccgccacacatggtttcagagagatggtacctgggaaaccagggaaaaagacggcctatgagcagaggggtgagggaggggcccctggaggagagctggtgctggacctggggaggtggctcagagtccggaagcagtgggaaaaggaaggactttctaggacgggctagaacagtttttgccatataacgaccctcaacacggagtggctggaaatgaagccctgccctcagctcatgtttctgtgggcagcagtggcagtctaggctggggtttgttggggctcatctgggwttgtcagagcttgcccaaacatctgcagtgagactcaggggcagcggggcagcgggcggcttcgtgggacagctgtcgttgccctgggggcctgcattctgcagcgtgtgctgggacatgttcacgtggacagtggaaagactcctaagagtgagagcacaagttgagaggcctcttgaaatgcacgaaacattgcttccatgcattgtgctgcctaagcaagtcacaggccggcccagattcaaggggtgaggaaacagactctaccacgtgatgggaggcacaagctcatcttccatagttggggagctggcctgcccggccaagtgaggcccactgccacgatgggcccggcacaggaatagcaggaccaggatacagacccagggactactggagataaagtggcggtcatggggggagtgtgactgcggggacacagagctgtgcacacaaggtcctgtctggggrtcttaasggagtcatgagacttccacagaagggtgactgcaagggccagagtcccagggataattctcaggacagtcacaatcccaaataaaggaagtgaggccagtgttcaggaggctcagtaggctgcttgttctttgtatccaagatacaaagccatttgatcggggtgcggtttgggkcgrcaggacaggagcagagaataaggaacaaaagcaaccgggtttggctacagggtggagacaggacastcagaggcacacagtgggccctggtgagaagagcagaggggtgtkccgggtgctcgagtcacacctgtgtctgattagggytgattaggggtgcagagtttgcaagatgtgagatgccctggccttggaggaggagggtcagcagactagagccttgggcccctccccttcacttaatttctttcccactttggcaccaggactattgcagcagggctggtgtatcccacctaccgcacatcctggagtcccccggacaaacagttccttcagcttcttggtccatgaggctggtgcaggaccagagtcagatacgtgttgtattgagccccatctcaactagtcaaatatgccggcctctgtcctcctcacccacacccctgtatgtctccatttccagcccatatgttgctgggctcctgtctccttggagacttctgtccctctacacataggagccatttgggatttcagcctggaaggtggatttagagtcagaattcagaaagccctgaggctagaacagagtgtggactttccccaggggtcagccatgagagctgagtcaggtgaggatcattgtcagaaactgtggcagcacaagccacacctgacttggaggactttctgcaggtagaagaggtgcggaagatgaaggtgggcaacccgctggacagggacaccgaccacgggccgcagaatcaccatgcccaccttgtgaagctgatggagtactgccagcatggcgtgaaggaaggggccacactggtctgcggcgggaatcaggtccctcggccaggtgagtcagagtgtgtcaggtccgcttgggtcaattgaggcagcaggtcccatggcctctggttccctgtccagctgaactggagacatctgaaggccaggtacctacacagtcaggctgcagccccatctgggacctgggatggactgggctgtggctatttgggcaccagccagacccggggatgggacgagcattattcagtgctggtttattcagtattgaactggactctgacttgcccttactgtcaccgcagccttgacagtctctcccccatagatttcatgagactagattttattatttttcctctatttcactggctgttaacctctcagccgttgcttcacctgttctctcaatgcaggtgcatccctgcctatccttagcttggaacacctctcatgggggactttttgcccgcaggatctctcccctgcagcagctcagaccctaccagatacaggcctccaggctccaccccacccagagctcctgaccgcacagccagcggcactggacacttccacctggatgtcccccaggcccttcaaactcaaaggtcattgcaatgtcccagctatagttgagcccagacacacacacctgctgctccaggaccctctgtctgatcgagcagtccaggccagaagcgcagcagccacggggatggaccgttgacgctgctgctgggggacaggtgccatgactgtcttcctcacccctagctcctttgtgcctagaccgggccttgcacagagttggtgctcagttaatttgatggcatgaaggagggaaggaaagaaggaatccctgactcttctctttctgtgaccctcatttaaattattggcctgattctgtcaaatctgagaattgtcccactctgggcctcctctgcctccctgacccttgtgcgggctccctrcatcttgcctcgctcagcgtcacagcagcctcccaagtggccttgtgagcctgctgatcctttattcacacagctgccagggtctggtgacctctcctctgttaagaccttgcagcagtgacccatcctcctgcagtgcaagttcggactccttgacctcacagccggagtccttcatgatctgtgcctgacttgcccttgacctgtactgcagctgcatttcattctctccagaggcttctcctgctttcttgggctccatgcatttgctgctgctcggcttagtggaggctttccagtgtccccacctggagagctcctgcttcttcagctcacaggacatccaagcccgggcatgcccgtgtcacagggcatcgggcaccgcacacctcaacagagctctcgtgaccattgcactgctgctgtcactgtccacttaccctcttcccactcccgctggactgtgagttccatgaggcaggtggggttgggggagcatcaccaggacccttgcagtgcaaggatggccgggttcaggattggtggaagacagtgtgatggaggccttgtaccaggagcagggctagggagccagcaaggggtagagcagcacccaggaaccaggaacagtggggagccatcaccccgccctggagggggtatgagaaggaacagaattcctgcagcccagtgaggggcagagcatgggatggggctgccttctggtggcccaatgaccaggagaccagctctcagggtctagaggggacaggggagagtacaaggtagatggggaggggatgacagaggggtggtcagcatggctcacatgccctggcagaagtggtgcaagactgtggagtaaacacaggccacataaaccactatgcatgtacatgagtcacattttcagaattgtaatcagtgttaaaacatcatttrtgtatgtatgaaaaatattgaacattttattaaataactttttaacatggtttgaaattttctatttctctaaaaactagagtgagaaaattcccagtctcttgattattcctaagttaggcaggattgaatctcagtgaggtcaggcaggattgacctcagtgcagcaggtcttagggctctgtctctagagaaaacagagaggaagcatttcagttgtcagaagtgcttctgccctggcaaccagggcctgtaggggctgcatccagggttgggagtaggtggtcccttcttgactggagagcatggagctgggccttggtagggaccctgggagggcagagggaggaagccccaggaggtcccagtgcccagagctcctcccctctcacctcctcctactccacgggttgtagccaccagggtcagtggcagagctgcctgggaggtttcacctgccaaagaatctaggtggttttagattagctgtcaccagaaaagctcaagtctttgcttcggccatgggttctggcactaggattggatggacttgggatcaggtctcagctctgtcacctgccaaccggcggccccatttccctcaacagcactccgttaaaagcacgstgagacccacatcaaagaacaagccaggtgggagagccatctgyagcgtggtgacacccatcacacrggtgcnntgacccggtgcttatgtcgggtcatccgcaggtggctggtgtggcccaggccctgctgacggagaggctggaccatcgggcaccgtgtctcccatgtgcaacgggcttttatctctcttgcagggttcttctttgagccaactgttttcacagrcgtggaagaccacatgttcatagccaaggaggagtccttcgggcctgtcatgatcrtctctcggtttgctgatgggtaggraatcctgctgatgtctcaagggccctgactctctcccacgtgttactggggtcttcatgtgggctttgggaggtagtctacgggcagtcaggaggagaactcaggcagggcgcaagccgtggacaccccgcttgtgccgcctgctgagtctccacacccctgagaagagagcccagtgacctggggctttgagtcccccctgtgagcaaaggcagctcccttccctgtccttgtcacttgtcacatgctccagcatgtttctcacagcccgctgggctctgttctaaggtctgttaccatgcattaaaccaccccccacactgagtggcttggaataatcagagatttattttagtcacggtctaggttcaatgaggcaaacccatctctgctccatgcagtgtctggcctcagctggggtgacagagtggctatcctgatgctgctgggggtcttgcgggaggcttcctccgcgtggcagcctcggggttgccgaggcacctggttcccttcggaggccaggtggaagccaaaaggctctttataatctagctctttagaatcccagagcatcccttccaccacggcctgttgatgaagcaagtcacccagaccaggctgggctggaagggaaaaactgtactccactcacagtggggccactgaggcccatgctgtcacttctcaggcctgccccttgtctccgtagcaccttggagcaaattgcaaaatcgtgcctcgtcctcacattttactatccaactaccaaaaaaaccccagaaattatcatcgtatgtcagtggtattagaataagagacttcactgccacctagccaataaatatggttgtagtaagtctccaaatcgctgatgtctggtgaatgcccaacctgcggcgggcacatgtgggtccttctgcatgtgaggacccagcggcccctctctgggcccctgctcccagtctgtggaataaagggctcacccgatgatccaggagcccctgtggtggccacctgcccatgggcctctgcccttcctcctcgctcgcagcccaacccaacccaatcttgcccccggygctgcagcccggcacattttctcctcggaaggtcttatgcagctggggtgtggagtgggccggggtgtggagtgggccaggctctcctctgcacctccctcagggagttcttcctggactttctctccagggacttggatgccgtgctgtctcgggccaatgccacggaatttggcctggcttctggtgtcttcaccagggacatcaacaaggccctgtatgtcagtgacaagctccaggcaggcactgtgtttgtcaacacgtacaacaagaccgacgtggccgctcccttcggaggattcaaacagtctggatttggcaaagatctaggtaacctactcctgcctgtggggttgctttcatttattcattcaacaaacatctgttcaaaaccacttagggccaggtcctatctcagatgcagggacgtagccttgaacatgatggctgtcagggttcgcttcttactgggagggaacttgtgacaagtccgtgagcaagatgcttgcagaggggkgtcgtgctgggaagaaggcaagaagaggggcctggaggagacactccmgccaggaggcactgggggcctctctggtgtggtggcacctgtgctacccagacctgcatagcagggaggagttggccrtgaagacccaggggcccgtgtttctggctgagggttcagcaggtccttgggggaaccagctttggtcgtggagctgcagagaggccagagtggtgggagtgggccaagggggagcaggagggaggagagaaggcctgagaggcaggtaggggccagattgaaggcccatgggccatggtcaggggctcaggttgcatccttagtgtaaagaggagccatgggaccaaatgtacccccgggtgaacaccacgggtgttgcaagtctcccagtagaggtgaagttactcaggcggcagcaggcggggtccaccggcacacagcaggcggggtcccccggcacacagcacaggctccccagtgctctgcctgctgggtggcatggagttctgctccggccctctctccctgggctgctccaagccttgggcctcgtcctgctctctcagcaggggggactagacaggtctgatgggcaagcttggcaagggtggctggcaaggtccggggaagccatatgctgtctcagaggtcccacctgtctctccaggctcctgtgccagcccagagaccacagggaaggtcatgctgaggctgggggtcaaaggctggtcactgtttccagttttctctcctccccctgcccccatctttcaagccctgcagaagcccccaagggtacccatgagaggggcccatgtgtgcccacagggctggactcacatgcacgcatgtgtaggctggacactcctgcttcctctgtccctgtcggcctcctcttcctgccttctcccaggccaccttcctggtgtccaccaggggaatccatgaggcccatggccacccagggaaggctgtggctgccaagtccccaggacgtgatctgggccccttatgaatcctscccgagttcccycagctccctcctaaccctagtccccatgtcctgctgagaggaccagcaccctcctgggacaggcccacaagccaagccttccaagcagcctgcctgggcagactcaggacctcagagggacggggcagtgccactcctggggccagccagagctgctggggagctgtcaggcagccccaggcctcacacttgtcatggggctgagatgcaccagccacatagcactgccaaggcctggggcctcagggccctgygaggcatccccttttcccagccacagcttgatgcagacgtagctgggggcagccatgagagaagagatgggccagtgagtctgggcagtaacgccaagtctctccacccccttccacctgaaggggcttcccactgtccagasaaggcggtgggagctggggaagattcttaaatggctgcctcagattggctttgtattctggggagtcctggcccrctatccactgccagggataacctgggtaagattcatgacctcgctgggcctcgacttctcacctggaagtggggtgagccagagctgcccccacgtggttgctgaggaataagacacttgcagccccgagcagtgccctgcctgtggtgggagctgctgtgacctttgtggtgtcttacaggagaggcggctctgaacgagtacctgcgggtcaagacagtgaccttcgaatactgaagaaaggtctttgtgagaagaaagtccctgcccctccctcgtggctggggccccctccctcttgagcctgggtgcacagcacctcccacctggggggctagtggaagccctcctgcctgcacaccatgtytgcatcttggacgccctctgtccagtcagaagcagcccttggctgggtgaggtgtgcccctcccagggagaataaagcttctgaagagagaccgtccacatctctgcgtttctctgctccacctgtgggtgttcctgggtgggcctggaagttgcgcaatcacctgggtatgatggtgttgcttggcctgggagagccagacacctggggagagagacaggaggaaatgggtgtgggtcatctcaggccccaaagagcagaagctgcgacagtcagggctgcaggaggtttggaagggtaacccctgggaaacaggtgggaagacggggattgagctgggtgagccctggactgggaagcagctcagactccctcagcagatggggccgggccctcgcccctgctctgtcagcacggccgtgctctcagctggtagccagcccgagggcctgcagtggagggctgggcccagctgggaatgccaggcagagctgtcttccatctgacacggtgtctcctatgtacctttatggcttctccttggcccagggacctgagctatagctctctttcctgtgccctctccctgtaggagcttgcggccctcctctctgcacccacatcctataggcaccaaacactgcaacctgacctacctgctgttacctcagtttccccacatggagctctcttcttagcatctcatctccccacccacctggctctgcccctctgggtcccacaggcccactgcaggcccctctgtccctcccacaggcccaggccatgctgagagctccaggcccagcctctgcatgtctgggaacatcttcaggcctctctgtgtggcatgctgcccttcagaggcctgtgagttccccgtctcctcagggattccctgccctgctttcctttatgattcctgctcttctaggaagtgtgtgcttccataaaggcctgtccagaccccgcctttcgaaggctgccagcagcaataacaacaggcagtgccaagctccatactggctacacttctgtcccttgagccccagctcgatgccaggcaagaatccaaatcctccatgcatgtttctcttgctactcatgatcccagggaggcaggaggtatttttatcaacatttataaatgaggaaatggaggcaaagagacatctaactgcccaaggctgcacagctactgtgaaattgtattccccttacttcccaagttaggaggacgttgaagctccctctgcctgtagaggaactcacccctcccaggtgccgagtctcccggaataggccttggctgggggtggcctggcagaggtggctgtgctcctgggcacccacacccaccataggggaggctctactctcccatggccaccccaccaaagcaggccttgctggtgatgccccgtgcactgctggagtcaggctgagctcacaggcctttctagaagtccaggagaaacccaccaactcccactctgtgcagttcctcagagcctgaagcccaggcccaagccaggccccccgggagcctcctttttcccacttcccacctgccttctgcggcagggtcggctcagaccccggcgtgctcctggcatgtccagcctcacatcttgctgcctccagacagaaaagaatgtgccttcacttctgcttaaagccttctgggctctgttcctagctcagaattggtcttctaccacaatgcctggtgctggagatggcagcttcccggagagaagctgttcccgtccctagcggtgggacttgccctagcacgtgccacttataccagaacagatgagtccatgtcaactgcttcctgagttccctttgttctgcctcaaacactaccagggctggggtatccacggcagcatccaagcacatgcagctgcctctcagcccacagccaggccgctcacactcctcccaacaagaggtggaagccagcctggtgtctccatagggtcagtcctggcttccccgtaaacatccttcgtgacagaagagcaggcaaagcctcgagcacaggcccatccaactcaaacagagccaggaagtgcctctccctgcttttcagacacaaacagagcttggttttagccagggcgcccactgcagtcacgctggagacctctggtgcagatgggcgagactggacccagctttccagctttcttcccctttccataattctcctgaaagtgtaaggtaaggacataagacttcgttatcccccaatttcctttctttgtccccttctttcttaagtcatataacctctgcattttacctgggcacacggctgcccagaagaaaggctggatttcccagcatactttgcactaagtgttggtcatggaaccaagttctagtcaacaggatctggctgcaaatgatctgtgcggtttccaacatgcaccctgaaggggggtcatgctgttgccctcctttccctccccgggctggctggaagcagacccagtgacacggcgatgggcattgcccaaccccgcggatgtgggcagcacttggacccgggggaaggaggggtgtgcggctgcccgcgatggaggaagccgagtccaacatcatggaggctcatctcccccggggcgactcactgccaggctattctgtgggaaataagcttttataagcttttgtggcctttgagaacgtttatgtctcgccatgttaacagaagcatttaaggtggtttagaagtataataaacaaaaatatgcatgagtgaacgggggctgagaggaaagtggtggtgagtcaaacccggagtgtggttgtatccagactgcaggctgtgaaactgcatacccttctaaagctgggccacaattcagctcagagctttctggctgctgagagtgcaaggacacctgactggtgacctcattcacggtgtccagatgccagaaacaaattagtgtttctgcttcccatagagataactgcttctcatagagatagtaatccatctcatgaatcctccttaaaaatgttttataatataatgactgccgtcttatgtgacttcatatggtggcaagttgcacacagctgtttcttatgaccttccccagtgtgactgaatgcacattaaacctccgccactaccagcagctcaccagggcagggagtgtgtgcatggggtggcagcacgctggatccagggctctagtgctctgctgatctgacttcatccaactgggatagggtgaggaagtggaattcaccagaagtctttccagagagagctttgcatttacctagaacattctgatgtggtgaagctggggcggtgggacattcagaatcaaaggctggccacagacttgctccaggtaataaagggaaggagaatcctaagggaggtggaaaagagaggagggcccggtacgtggcaagaggggagggagggggaagaggaccctccgtggcagagtggagacccgtctttggggagaatacgggagtatgtaatgaaaattcccttccttttctcccctccaaaatcaacagttcctctttgttccctgttctttgtgggaatgaccccttttgggcaagctcaaagaggagttgatttctttagctacagagacacaaacaggaacagactgcagagcaaagcccaccacatcaggttggactgcacatccattaggcatcctccacaaaggccgcttctccctctgccaacccacagtggacatgagtaggaccaagaaattaatccttgctgtcataagctactgagagctcagggctgtgttgatggccacagtgacagactctgggtatcagttataacgcagttataaagttttggagcaaccaaaacagcaaacagtagaggaagagttaaaacaatgattcccaaccttaactacctgaatatcttcattctaccctctttatttatttatttagatagtctctgtcactcatggagtgtagtggcgcaatctcagcacactgcaacttccccctctcgggttcaagcgattctcctgcctcagcctcccgagtagctgagactacaggtgcctggctaatttttgtatttttagtagagacggggtttcaccatgttggccagactggtctcaaactcctgacctcaagtgatccacccgccttggccacccaaagtgctgggattatgggcgtgagtcaccacacctggcctcattctaccctctttaaatcctctaatgaaattcacagatcatattaccaacacattatctaaatgatattaatatattgccgtcactttaaatgagaaataaagaatagaaattttaaaataagataatccatgcttcaccaggtagatggtgggaaagttccagttgctcccgggctctggagcactaacttgaattcagattttactcacaggagctcagaacctgagattcaattgcaaagtagctgagggctaatcagatctgtcctgggttgccttctgcactgcctcgtggtcacaaaaggctccaagcatggactttaaaaatattatgagaaaacatacttaacataaaatttggccaggcacagtggctcatgtccgtaatcccagcactttgggaggctgaggcgggtggatcactttgagctcaggagttggggcaacatggcaaaacctcgtctctacaaaaaaatacaaaaaaaaaaaaaaaaaaagccaggtcatgtccatccctcctggagcagctgtcagcagaagtcagggcttggccagcccaccactggggcctgttcccagagggccacctgccagcagtggaggggaaaatggaggccagccctggactaaggctgctggcaccaacctggaatccatttgggaaagatggagactggctgggaacaccagctggacactgtggtggcagggtgacagtgacaaattggaacagtcatgagggaaggtgtgggcagggccaggcctgcctggatgcccatgtcaagctcacagtcaagccctccctattcctcagacctcccccgtggtccatctgggagctgggaatccttccttccttagagattagtcccatcagggttttagtaacaataataaacataacagcaggaaacactattgacctcactacatgtgaggcgccatactgttatagcagctcattgcaaaataccatggcccaggggcttaaacaatacacttattttctcacagttctggaggctggaagtctgaggttaaggtgccgacaggattctgtctgatgaggcctctctccctgtcttgcagatggtaaccttcttgctggtgtacttgtgcagagggaggtctcccctatctctttcccatctcttctaaggactccagtcctactggattagagccccaccttataacctcactgaatctttactatctcctgataagccctatctccacatagagtcacattgggggctagcaattcaacatatgaatttgcagggacccaattcaatcctaatagctcctaacattgtatgagactttattatttaccaatatatcttatgtctatcctatctttagtttccactgaaaactgcagtttcagcatagcagctctttgccaagctactcactgcttagactccagccaggcctctggattcctgaactagcatttgcaagtgctctgtgtaagggggagacagaggggcatgaactagtctacaggaactggtacacactgcctcccacttaccaaggtcccaagaagtggatcctgtgtgctggtgtggtgactgccctttggagcttggctgcaatgcttggttgcctccttttctagaatgctcccattttccccgtgctttctccttgactgaggccagctgctggttgctgtttgtcattttactttgccagtttatttttcatgcattagagttaggaagaaaatagtgtcttgtacccataactctatgaaaaccagacaggcccagctcaaaatttatagagcccagggcaaaagtacaagtgagggtccacaaaccatatatctaaatatttcatgattatt

SEQ ID NO: 95859 - DNA, 36026 bp, Homo sapiens
gtctcgctctgtcgcccaggtcggactgcggactgcagtggcgcaatctcggctcactgcaagctccgcttcccgggttcacgccattctcctgcctcagcctcccgagtagctgggactacaggcgcccgccaccgcgcccggctaattttttgtatttttagtagagacggggtttcaccttgttagccaggatggtctcgatctcctgacctcatgatccacccgcctcggcctcccaaagtgctgggattacaggcgtgagccaccgcgcccggccgcaacatgctgttttaatgagcgcctgggtgcaggtgggctgaggcctaaaatggcatcagccccaagtgaggacgcggcaaaggttttatagtctcctgtaaacaggaagtgtcctagtctgacgtaactgctacgttgtacccggatggactctttctcgatcttcacgggtacatgtcttcccaccacggtaggtgtcttccagccagctcttgtcctgcttctgctatcttgctggcacaagtagccttgcaccttggaactgggcctgagaagggaggagttattcatcttaagctttcaggccccaggaagaatcttaaaccctctatttttatttttctgccttttgagacttggagaattctgcattttcttctcttgagttttgaaccccatatctaagtttctgtgggattttgttgtatttgtgaaataaccaaaggtatctgcctttgagagctgaggcagtggctaattcactgcagtatccactacacacaggacagagcgtggcatctgcaacattaaatgaatagtagcttaataaacagatctgactctcaggttcttcatcaccctacagcaggctcaggggtggccacggctgacagtaggagatgctgctacagaactgggctccctgatagccatggggatgacagcaatccccagataacagacgccagatggtagtgcttaggcgtgagaagcaaagtgggtgcaactgtcataggaccatcaagatcaagctcaatatatcactgggatagacatcctgtgtagtaaacaaaatgcctgcactggttccttggtctatggggtgagagtgatggtagtaaaagtcaagtgaaagcctctgagaccccactatcaccaccacccaccccggccaagagagcaagcacataaacaacatcacacaccagagaaaatggcggagactggtgccacccttgaagaccaaagacgtgtggagggtatcccccaccatgtacctatttaattcatcagtctgaccttataaaaataaacagagtggcaatggactattgcagattcagccaagtggtagccctgaccacaggtgctgtgcaggtgcattgctagcacagacagatcagcacggcccccgcttctcaggggccatctgatcaccacactttttcatccctatcagggaccatttgcactcataggaacggccaacaatacacacatatggtcttgccccaggccaatgatacctttcccatcctttgtcatcacagtctgaaggagactgggccatctgaacgtcttgcagaacactgcactggttcatggtgtcaatgacaatgtgctaatcaggatggatgagcaggaggtgacaagtacatggaaaacttgatgagacatatgtgctccagcgggcagaagattaaaccctatgaagaattaggggcttgccacatcagtgaggtttgtaggggtctggtggtgtggggcacaccagaacatccccctgcacactccatcacagaagagcaagcacaatgcttagaggcctctttgggttctggaggtagcagattccacacctgggagtgctgctctgacccacatatctctgggtcacatgacatcaaaggctgtccctcaggctatgggacccacagaccccatgatactagaggcatacatggtgggaagatatgctgtgtgaagcttacagcaagctctggtgggaaaaaccacaaagtagaccccctagggttctggagcaagaccaggtcatctatagtagagaactagacaccattcacaaagcagctctgccaggctactggaccctggtagagatgactaggggacatcaagtgaccatgaggccagagctgcccctcatgaactgggttctgtcaggccctctaatatgtaaattcaggtgggtgggcctagcagcaatccactgagactgtaagcaatccgttgtacatccacatcacctaccactgccacagcagctcctctgcctcagttcacaactacgccaatgggcagttcttacggaggaaaaaggctgcgcttgatcacagctgagctggctcaatacatgggtcagatgtagtacctggatgtgcagcggtcgcatggagcccttgaggatgaaagccacaggctacagatggtggaaccagaatggggaggagacttgtcctcggcgatgtcctgaagcagctgccccagcgctggatgcctactgacctgggaagagcaaaccccaaggtgatgtgtcctggagcaagtccagcatgactgttggctggggtcccagctcctcactccccaagcctgtcccaggctgcctgagtgtcctcaagacatggatgctgccttctctcagagtgagcaaagctgcagtctttttgtaactgaatctccaaagtaacatccaaccacatctgtcctatgctgttgggaggagatcacacaagggtgtgaataccagaaggcaagggccatcagggccataatagaggctgcctactcaccccacccacctttctgtctctcctaccctgcccccaaccagtgtttaaacatgtccaagaacctctcatctgagaaaaagccatatcccactccagtgcctgtcccagctctcacagtccattccacacctgggaatgcctctctgacccatacatctttgggtgacataaaagcactccagcctccaactagtaactcacattcacccttctcacttccctgcatcctacctgtcaacacacttcaatgtagtgtctgactccagacacaccggccagcccagatctgctatcgccagggccactaacagctcctagtccttatcagatgacctctgggcagccagctgaccccatccaccatcttgactgctctcttcagtggcctttgggagggctcctgataatccccagccctgctaggatctcctctccttcagtgtgggccggacctcaggactcacttctcgctaagagaatatggcaaaagtaaaggaatatcacttccaagacatggcatctgtcttgtatggcctctctctcttgttcgcttgctctgaaagaaaccagctgccaggttgtaagctgctctgtagagaggcccccacccaagagccagtgggaaactaagtcttcagtccaacagcctatgaggacctgaatcctatcatgtgaagaagcttggaaggggatcctcctgaagatgagccttcagaggagacagcagccctggccaataccttgcctgcagccttgaaagaccttgaagaagaggcacccagtggcatcgtgtccagatccctgatccacagacaccgagacagtgggtgctaattgcttcaaggtgctaaatcccaggataatttttttttttttgagatagagtttcgctctttttgcccaggctggagtgcaatggcacaatttcggctcaccgcaacctccacctccagtgttcaagtgattctcctgcctcagcctcctgagtagttgggattacaggcatgcgccactacgcctggctaattttggatttttaatagagacagggtttctccatgttggtcaggctggtcttgaactcctgacctcaggtgatccacctgcctcagcctcccaaagtgctgggattacaggtgtgagccaccatgcctggccatcccaggataattttttatgcagcaatagataacacaagcccatgcagagtctcttcagctttcctgtcagcagctcctagcatccgaggtgcatccttcacatcctttgttggtgtctcttaactgttggggtttcccaggtcccaggcttagaccttctcatctccctgcactcactctggattatacaaccactcccaaggcaatctacagcttcagtccaaacacgcccttgagtcccatacatggatatccaacagcttcctggatatgtcccctcggcccaaattcagcacagccagaaacaaactcatcttcttcccccttaaattgctggtcttcctgtgcgctcctatctcagctatcatccacctagctaagccaggatcctggtgtcatcctgcatgcctcttttgctgtcctcaatcaccaacacctatagaccccacttcctggccgggcgtggtggctcacgcctgtaatcctagcactatgggaggccaaggcaggcggatccacttgtcaggagttggagaccagcctagctaacaatggtgaaatcccmtctctactaaaaatacaaaaattaaccgggcacaatggcgtgcatctctaatcccagctactcgggaggctaaggcacgagaatcgcttgaacttgggaggtggaggttgcagtgagctgaggttgcaccactgcactccagcctgggtgacagagtgactctgtctcaaaaaaaaaaaaaagattccacctcctaaacatcttgtatttccagttctctccatcactcctgcctccctaccctgggtcccaggcagagatgcttgttcactgcacaaagtgcctggctaagagggttgcgattcagccctgcctctgctcactaaggctgcctggaactagacaagaaccacagcaacctcctcgtttgctgccttcaacctcgttcaatccacttccacctggtagcagccagagggattctaaaacccacactagttcacgtctcaccctgctcaaaatgcttccatggccttccattgctttcagaatacagaatagtcaaactctctagaaaaacatctagctcttttttgatccggattttctctccctcaagtcttgtctgttgcccggcatcataagctcctagggttagttcttagggaggggcttgcacatccgggccctgccatgacctctgcagctttgcacatggcatccttctatctgtaacatcctccctgcgtcttcgctcccctgggcaaagataactcctactaaagcctcagatgtgacctcctacaaaatcccagagttgtccagctgcttgaagtattgagcctttgagctttgggagaagttaaaccattgtgctcctaagacggtaagaagcgtcagaaaaccaggctctgaacctctgctgtctttttttttttttgagacggagtctcactctgtcacccaggctggagtgcagtggcgggatctcggctcaccgcaacctccacctcccaggttcaagcgattcttctgcctcagcctcccgagtagctgggattacaggcccgtgccaccatgcccaactaatttttgtatttttagtaaagactgggtttcaccatgttagtcaggctggtctcgaactcctgagcttgtgatccgcccacctcggcttcccaaagtgctgggattacaggcgtgagccaccgcgcccggcctctgttgtcttgtcagcaaaatggccctggtgtgaccgaggtcacgcagccagcaagtgtcgtcgggtcccctggagcctcagcttctacctccgctccagctcccaccacagcgcaggcgagcgcacgcgcacagcgccgggccgcacacctccgggctctgggcggagcgcctcgggcgttgtaggcgggaccggaccctctggcccgcccctccgtgtcccttctggtcgccagtggacgccgacgtcatgacgtcgcgttccgtagggctcttcccgggctttggtgggtcaygtgaaccacttttcgcgcgaaacctggttgttgctgtagtggcggagaggatcgtggtactgctatggcggtgagcgcgctggcgcgtggcgggcgggcgccggggacatgggtgcggaggctgcgcgcttcccgtactctggccccggcccagggcggcgctctgggtgaggctgggccccaggctctggggcgcagctactttctcgcctgcaccctgcgtgaggcgactcgcctacctaccactgacctggggccctgggctccctaaggcgagctcggcccgttcagcctctgtcctttattcaccccacacatacttattgggcgccatctgtgtggcgctgagcgtacaaaagacaggcccccatttcactacactcctttaaactttttttttttttaatttcccaatgatccttgttccaaacactacacttacttttgtattaccttcttgtccctttgtcttgtatactgtctgttccacatctgagttccagacctcttgttttggtggctcttctatgccatctctatcacaataccttgcgcactgtgtgtgctgaaataggtctaatgcttaaggggagataatagacagtaaacaggtaaataggcaaatgacataacctcagtggtttttcatggagaaagcacggtgatgtgggtgaccccgatatttgagctggcttctatttgtttggaagccactgactcagattgctcagctgagagcattccaggtgagagaacagcaagggcaaagatctggaggctggaaggggtttggtgtgttggaggacaagagtcacaggtggagagaaagaagggaaggcccctgatggtaaaaaggaagctgtatcatgcctcaccagcttcctaggtttctgacaaccgcaccttctcttgcaggaatcatcggaatccttcaccatggcatccagcccggcccagcgtcggcgaggcaatgatcctctcacctccagccctggccgaagctcccggcgtactgatgccctcacctccagccctggccgtgaccttccaccatttgaggatgagtccgaggggctcctaggcacagaggggcccctggaggaagaagaggakggagaggagctcattggagatggcatggaaaggtaatttcattcaaggccctggactcagcagatagttttgcagagagcccattgtgtgcctggtggcctggctttgggagctgggagcagatgaatcgatggcattcttgcctttgagcacagcttgatccagggttctgaggagacaggtttacagagccatgacacaggtctctttaacttactgcatgtaacttggaaagactagaccctaagctgaggataagccccgactccataagcaccccagagaatgtaggggtctctaatctggaatactccaactcaaaaagacaggaagcaggaagcccagtgtttcccagtaacttttcaaaggaaaggtgcatgggggaggagggatctgataaataaagttttagagtcaatcagcaaacatttattgtacctaatgtgcaccatgccctttgttaggaatggtcttgtttattagtaaacatgtggtggctcacacctgtaatcccagcactttgggaggccgaggtgggcggatcacctgaggtcaggagtttgaaaccagcctggtcaacagggtgaaaccccgtctctgctaaaaatacaaaaaattagctgtgcatggtggtgcgtgcttgtagtcccagctacttgggaggctaaggcaggagaatcacttcaacccaggaggcataggttgcagtgagctgagatcacaccactgcactccagcctgggcgaaaagagtgaaactctgtttcaaaaataaataaataaataagttagcaagacttaatgctaggagagtggagtaagctctgcgcataagcaaggctagatttctacccctgccttactctgcatttccagctgcgatctggtagataacgtcagtagcggaattgtgtgaatgcccaggagcctcgtggagatgctccttttgtgccttttcagccttagcatgtgtgagagtactgtgcagggcatcctgccgtccctaggatgtcagacagttgagaggctttcaagggcactccagactggatgcatctttgctattatcagtaccacccccaacgatgagactgcatgtgctgtaggctgtagaaggaatgaggagtctggataaatctgccctggacttggggtcagggcatgggtcctagacggctttcctgttctgcctgatggagttgttcaggccggatgcccctcctctgctgtttcccctccctgtcttgaccctttctctttgcttctctgagaagcaaagagagaggcccttggcagggggcttctgggtagaggtatctgagggatggctgagcccaattacatttgtttttgtggtttttcaaaaaaaaaaaaaaaaactttattgggctatagttttttagagtttaccccttgcgaaaatataattcaatgcaaattcatggtaaatttcctgagttatgcagccttcaccacaatccagtgtgagaacagggccgttttcccattgaggtccctcctgcctgcttatagttcattctcagttcttacccaacccacaggtaagaattaaagacctgtctctagattttccaatctggtcatttcatataaattgaatcatattatatatgcacttttgtggtgggcttttttctcttagtgtggttttaaggtctttctgtgttcttgcatgtgcagcactccattcctttttgtggctgaatcatatttctttgtatggagataccacatctattcatcagttgatggatgttggcttcctcaagccttttggcgattatgaataatgttgctatgaacattcattacaggtcgtgtttttttgtttgtttgtttgtttgtttttgagttttgctctgtcgcttaggctgcagtgtagtggcacaatctcagctcactgcaacctccgcctcccaggttcaagcaattctcctgcctcagcctcccaagtagctgggatcacagacatttgccaccacaccggctaatttttctatttttagtagagatgcggtttcggttttaccatgttggccaggctggtcttgaacccctgacctcaggtgatccacstgcttcagcctcccaaagtgctgggattacaggtgtgagccaccacacccggcccgttacaggtttttatgtgamcagatctttaattctgttggctatgtaggagtgagattgttggtcttgtgtttaatcttttgaggaactgccagactgttttcaaaagcagctgcactatcttgcattcccaccagcaacacatgagggttccactcctccgtgttcttgccaacattggtctttttgattctggccatccctgcaggtgtgaagtggcatctcattcctgatggctaatgatgttgaacatcttttcgtatgcttgattggctatctgtgtatcttcagagaaatcctggactcactttttaattgggttgcttgtctttttactattgagttgtaagaggttttttacatattctgaatataagtcctctatcagatatgtaatttgcagttattttctcctcaatctggcttatctttttcgtggttttaatgttttcttttgaagtgcaaaagttttgaaatttgatgaagtccagtttaacttttttttttttttttttttgtatgaaccaattagaagtttgctgagggcattttgtgtgacttgagatccagggagaatgggaccgataccttttccccgaaaacatggaagaaatcagacctggtcaactctgatatctgcctggctgggttctgcttggggcatcaacagcataaaaagatttgttctgacagtagtttgacaatgtttattgcagaaaaatagtagcagtttctcttgtcaccatttaacctgaaaaaaggagaattcaaggggattgtcttggggaggcagtatggcatgggggaaggagctctgggcttggactatattttgacactcaggtctacagagcgaccataggcaaaaatcacattttcccctcaactacccatttcctcatctttcagatggaatgacagtgtctcctcctcagggaagagagcactgcagggaagagagcacagtgctttgcactcgctgggtgccttattaaggcattacttctcttcagtatctgaaggaagataatgtggaaaatgtgtgtctgatggtcttagagtagctcaaagggttgagacagtgggtggccatttcagagggctggtttggctgactgtgcatggaagccaggacatcaggttgttgaaggcggcatagtcagagatggggaaagtacagggagaattccagccctcacggggagttgggtcagctctctgaagccttttggtctaatgttttgtggttccttgaattattttttcttattgggcgcatagaagctgtctggagatctacctccccttttgtaattgtrgtaaaatacacataacaaaatttaccttttcttttgttttttttttgagacagagtctcactctgttgccaggctggagtgcagtggtgtgatctcggctcactgcaacctccgaaagtgattctcctgcctcagcttcccaagtagctgggactacaggcgcccaccaccgcgcccaagtaatttttgtatttttagtagagacggggtttcaccgtgttagccaggatggtctcgatctcctgacctcgtgatccgcccgcctcagcctcccaaagtgctgggattacaagcatgagctactgccctggcccaaaatttaccatcttaaccttttttgtttgtttgtttgtttgagacggagtttcactcttgttgcccaggctggagtgcagtggtgctatctcggctcactgcaacctctgcctccctggttcaaagtgctaggattacaggcatgagccaccgcacccagcccttttgtttgtttgtttgttttgttttgtttgctagttttttgagacagggtcttactctgtcacccaggctggaatgcagtggcacgaacgtggctcactgcagccttgaactcctgcgctcaagcaatcctcccagctcagcctcctgagtagctaggactataggcatgtgccaccaggcctgggttattttttttttctttttgttttttttgagacggagtctcactctgttgcgaccaggctggagtgcagtggcacaatctctgctcactgcaacctctgcctcccgggttcaagcgattctcctgcctcagcctctcgagtagctgggactagaggcacatgacactacgcccagctaatttttgtatttttagtagagatggagttttaccatgttcgccaggatggtctcaatctcttgacttcgtgattcatccgccttggcctcccaaagtgctgggattacaggcatgagccaccgtgcccggccattttctatttttatacagatggggtctcactatgttaaggctgttcttgaactcctgggctcaagtgatcctcctgccttcacctcccaaagtgctggaattataggcatgaaccaccatgcccagccatcttaaccattcttatgtgtatggttcagtggcattaagtacattcatattgttgtgcggccatcaccgccatccatccacaaaagtcttttcagtttgaaaactgaaactgtctcggttaaacactaactccccattcttcccagcacctagcaaccatcattttactttctgtttctgtgaatttgaccgctcagtgagtggaaccatataggatttgtccttttgtgcctggcttctttcactcagaatcatgtcctcaaggttcatccatgtgccagcacgtggcagaatttccttctattttaaggcttcatcgtccatcatatggacagatcgtgttttgttcatccattggagatcttttctgagccttctgtgtttctgacctggaagcgctgagcctacccacaatggggctcctgaaccttagggaacaggcccagttcctggatggggtttggtgcttagggttttcctttttggcagtaaccacatctgttttggtgctccctcagggactaccgcgccatcccagagctggacgcctatgaggccgagggactggctctggatgatgaggacgtagaggagctgacggccagtcagagggaggcagcagagcgggccatgcggcagcgtgaccgggaggctggccgrggcctgggccgcatgcgccrtgggytcctgtatggtaggtccagttgtctgcctgcccgagggactgggaagctgggaaggagtctgggaggggagtagaaggtgctggggatgaccgcagtagcaggtgtctcttgcctccccagacagcgatgaggaggacgaggagcgccctgcccrcaagcgccgccaggtggagcgggccacggaggayggcgaggaggacgagsagatgatygagagcatcgagaacctggaggatctcaaaggccactctgtgcgcgagtgggtgagcatggcgggcccccggctggagatccaccaccgcttcaagaacttcctgcgcactcacgtcgacagccacggccacaacgtcttcaaggagcgcatcagcgacatgtgcaaaggtgtggcttccctacrcccccgcctcagcccctgtagcgcctccctaaatcctccccagaaagttgtctgagccgagtgaacacgtgaagcacagggcatatggctgagaggtctgtcagagaaaccaaaagttttgagttttgcatcagggctctcctgctggctatgcagtgaccacatctgggccaccaaagcgttttttgacaagcttgaaaatggacagattttatataaaaatctggattactactttgatctttgtaataggaattgactcyttttttttttttttttttttttgagacggagttttgttcttgtttcccaggctggagtgcaatggcacggtctcggctcactgcaacctccgcctcctgggttcaagcgtttctcatgcctcagcctcccgagtagctggaattacaggcatgcaccaccatgcctgactaattttttttttttagtagagaaggggtttctccatgttggtcagactggtctcaaactcccgacctcaggtgatttgcccgccttggcctcccagagtgttgagataacaggcgtgagccaccgtccccagccaggaattgacttttaaaagggacatgtagatcttgattcctgcaattccttccactgctttttgtcctgtgtttgtcagtttcttcctggctcttgtaaggcgtttcatgtttgtagctgtgtaggcactctgctcatatttaatttaaccccccagcaactttgtacactgtgtgacatgcccattttacggagtaggaagttgaagctcaggctatgtcacagctgaagtgtggtagacctagaagtgaaagctgggctttctaggtcaaaatcaatggtcggggtgggtaggccttgcttctcacacaggcattgttgcagcccagcccaggcctcatgcttagttaactctcttcccactgtgcccscytctagagaaccgtgagagcctggtggtgaactatgaggacttggcagccagggagcacgtgctggcctacttcctgcctgaggcaccggcrgagctgctgcagatctttgatgaggctgccctggaggtggtactggccatgtaccccaagtacgaccgcatcaccaaccacatccatgtccgcatctcccacctgcctctggtggaggagctgcgctcgctgaggtgagctgagggcaggtgaggatggcaggtccgagctcagtgctgggtgactcggtcgtgattcctgaagagcgattgtggtgtgggcggggagggtgcagccagcagcatcctcatcgcaggtgagttgtggttgcacaggagtgtgatgggagggatcttcccgggctgggggctgggcccaatttccaggacagtgtgttgggacactctcgtctgcagcctggcctcaccctggctcacggcttctgatgcaccctctgcctccgcaggcagctgcatctgaaccagctgatccgcaccagtggggtggtgaccagctgcactggcgtcctgccccagctcagcatggtcaagtacaactgcaacaagtgcaatttcgtcctgggtcctttctgccagtcccagaaccaggaggtgaaaccaggctcctgtcctgagtgccagtcggccggcccctttgaggtcaacatggaggaggtgagagaggacacaaggtctgctgccagctgtccttaggggtgcccagtatgcaggacctgactggcctctcaggctgtggaagaccagtgtgggcagccgcaagaagcaagatagaattgtgtgttggccacaccctggggtggacccagtctgtctggccagtggacttagcttggcccacacgacgtttttaggaattcaagtcaatatttaagtcaggcgatttgtttaaaccatacaagtttatggctcctcttgaaacatgagaagatctggcaaacagggcccacttcttgccaggtcactccttcaggatgtgtgcttaccagtctccatggtgccatcactcacgtggggtggctgcagtcccatcgggacttcccctcagcttgtttctgggacctgtctggctcacgtggggcccctggaccataccaacctcctgcaccatattcaggagacgctgccaaagcctctgatgttaaggtcttaggcacatgtaatgtgcctttgtacttgagcgtccctgtaaatgggctcatcgccatcgctgtggtggcgcccaggccccttgactgccttgctgctgtggctgttggctgtcctcttctcaccgctctgcagtgcagttctgcgaactgtcccagctggagccaycttgccagaaaatgcctcagaggttccacctgtggccacctacagccaaaagctgacccgtctcgtctcgggtggggcagctgcaggccagatgccagctgagccacgtctttgctcactcttcccatgccctgtctgtctccctcaggccttgcttctagggacctgagatagtacctggtagagggttaacagttacagctatcattcatggagtaacttaccagtgccaggtggtgggtggtttattacctggtcctttttcacagctcatgaggcaggaactgttactggccccactttgccgagtgtttagagaactggctgaggtcacccaaccagaatgtgtgttagaggtccacagctcaggcatcttgatctagagcatgtgcttttaactgcagtgccatgttgtgagataatgggtacgaaatgacatggcacagtgctggcctgtgatacttgacagtgacagccaaaacttcctgtaacttaacatttatcagatgctggattaggttgatgtatgtatgacttgctttaattcttattgtgaggttgcagagaaggcacagagagaggaagtcacttgcccaagatcacacagcttagacacagaacccaggcagcctggttccagcatcggtactcaagacagcttarctgtaaagcatagagcaggtgctgagtctggccgtcagaaggcatcccagagggatggtgtggcaggagtggggactgtcaactgatgtgctgagtcgccatgaactcattccttgctgtctttggctctccatttgccactcaggagtcggaatcctgcctgttctccctcctgttcgggggtcaaggttaggtgacatagtaagtcagtgatttgaggccttctgtgtgtccctcgcagaccatctatcagaactaccagcgtatccgaatccaggagagtccaggcaaagtggcggctggccggctgccccgctccaaggacrccattctcctygcagatctggtggacagctgcaagccaggagacgagatagtaagtggccggggcaggctgrgagggagccaagttgcagagggaactggcagaagcagttgtggctgggccggtggcggtgtctatggtcgcaggggcactcgggctaggatctgtttttgcatggctgaggcaaagaactttcttctggtggatgggttgttggaatggtgggtttaggaggggttttactgagttacttatcttggtgtctgtagtgtggagcacttgcaataggagaaactggaggaaggcagcacggaggtgggcacccctgggttaggctctgacttcttggcccctccctttccccaggagctgactggcatctatcacaacaactatgatggctccctcaacactgccaatggcttccctgtctttgccactgtcatcctagccaaccacgtggccaagaaggacaacaaggttgctgtaggggaactgaccgatgaagatgtgaagatgatcactagcctctccaaggatcagcagatcggagagaaggtaggtggaaggcaggggcaggggctgtcaggatgctgtgagaggatatggagggttgctggggctgtggtaggcacctagggctcactgctcaaaccttgccttattcccctggagctcagtaagcttgtctggaagggaggccctgtgctccagggaagaggtaaactcgcattggggatgggtgaacctggctgtggctccaccatgggccagcgaggtagtgggataacttggatgacctctctgagtctgtgtggtgggaggagtcccctgctgaggacggggttgcgacgagaagagctcttcctttagcagatcatttcaagctgtggtttgaaattggaacagaggcagggcaataggataacttgtgtcatgagggattcctagggatccagctgtggccaacgggaatttcttcagaaaaacaacccagaatggtggtgttttttgtttttttttgtgatggagatggggtctcactaygttgtccaggctggtctcaaactcctggctcaagatcctctcacattggcttcccaaagtgctgggcttacaggtgtgagcccttgtgcccaggcagttgggcagttggtttttagtatagacatccttactgaaggatgaggagatggggatttatgttgcagaaatacggattacttaaacagaacgttaaatttctgttgataaaaaccctttgctgtttctcccacattacctccatcctgcccccagagcaccgtgtgttctcaagctcgctgctctcccctttctcttccttccttcctctgtttctcagtcaacttccttttttttttttttttttttttttttgagatggagtctctctgtcacccaggctggagtgcagtggcatgatctcagctcactacagcctctgcctcctgggttcaagcgattcttgtgcctcagcctcccgagtagctgggattacaggcacacatcaccgcacctgactaatttttgtatttttagtagagacagatttcaccatgttggccaggctggtctcgaactcctgacctcaggtgatccgcttgcctcagcctcccaaagtgctgggattataggtgtgaggcaccacgcccggccttcaagtcaacttgaacttcagtttttaatgcagagcagtttagttcgccctttaacctccactcttctgccctctggcaagataaaattcagttcccatttggcttcttcagtgaactgggtgatttccttctgacgtatgtaaaccccccagggacaggagccatcactggcttaatcacctctgtctccagggcctggctgcaggaggccctgagtaattttgaaggaatggatggtggggtaaggagagctgtgtccaggctgcaggttagctgatttgttttggttgtttctctccatccaccttcccctgaagcctgtggagccccctttcttggttcctctgaggcacggctatggttgccccttccttttcctcctcacgcatcacatttacccatgtctgcctgccacttaatattcctacacatgcatggtttgttctgttcctttctttactccttgaggcgtgtattccaagtaggcagggtagttttgtgtctcggttccttttctcaagtgtattgcgtgtctttgcatccaccgtgagaagctgctgcaggctagacgcaaacccagtaggggcaaagcatccagcatttgtgggcttatatgttactgtcattgttcaggaaagctccagaaatgcatccctggcagaggctggtattggtgccattccttcccagctcttggccatcgaacctagtctgcgaagatctggggttcccataggagaggtgggtgtttctcagcgtcaggaagccaggagcttcagttcagccaacacacattggttcctggaagacctcctagggccaagttgtagggatacaatggtgagtaagtcagacatgacccttgccctcagagctcatattttactagggttcccaataataggaaatagacaagatcttttcatgtagttttacatgcgaggaagacagtcacacaggcaaagaaagccaggacctcccagccttctaccctcaccacctgcagaggctcatgagtgctaccacagtggacacctttgcagaatttcatccagatgtttgagctaatttcttcaggcttgggtggacttggccctgctggggtcttacagtccctaagcagccgggccacctgtgtcccacatgattatctgtgtctgtgcctaccacgccaaaggagctgcatgcttgaggaactctcttctggcaccttctcttcctttgccttgagcttcagccactaatctcccactctgytgattgaagaggtgagagacccataggtgagcgtgtggcgggcatggcatgcctgggcactaataaggcatctgcccgggccatccccatgtgcttctggagccccaggttccaaaacgacttgttccccaaatggaggcagccctaccccgctcccgtgtcttgatgcctgctatttgtgtctacatagagcaccttctccctcacttgtccccagctgacttctgtcttctgcagattccatctccagcaggaagccctgcaggcttctgcagctgacttttttttttttttttttttttttttttttgagacggagtctcgctctgtcgcccaggctggagtgcagtggcgggatctcggctcactgcaagctccgcctcccgggttcacgccattctcctgcctcagcctcccaagtagctgggacgacaggcgcccgccactacgcccggctaatttttttgtatttttagtagagacggggtttcaccgttttagccgggatggtctcgatctcctgacctcgtgatccgcccgcctcggcctcccaaagtgctgggattacaggcgtgagccaccgcgcccggccaacagctgactttttgtatttgtttttattttgagttagttatcatccttgagggatccggagacttcayatagaaatccggatgctttttgaaaatccaagatctgtgggtgctggctctgtgttcctctctggtaacgctgacggagctgaggcatagctgcccttgcaggtagggcctgtgtccccaggtttaccccgtcccctactctgtcagtttcayggccctgcctgccttccgtgggccctggacactgatctggtaaagtattaaagagatcagggtcatgcccaacacttagagattttaaagaactaacagaagcagcatgcagtctgaagccagactttttaggtttgaattttggcctaatccttaggatggtcagatgagtcacccttatctatagaaatgagaggatgagagtaaacactcatagagttgttataaagatcaaataaattagtgcatataaagtacttggctgttggcgagtgctcagtatctggctgttactgtacatggctaccaaagttaaactatttgtacaaaaactggatggaagagcctgtgacaggcgtgtagaaagcataagcagccagtaggtaggacaaaaatagctttgagcctgatgctttaggcattttacacacattatctcaggctcatggtacccatgcaggtgggtgctttttctccgtttgctgggtggagctcacagtacccactcaggtgggcactctatccctgtttgctgggtgcggagactgaggagtgctaggaagcagcacacctagagccaggaggagcatgagctttggattcagatgcatctggggtcgagtcttgcctctcctctaggagaaaatattttgacctgagccttggtttcctctgtaggatcgagagaaacaaggttattatgaggattacatgaggtaattcatggaaagcgctgttattccctggcaggtctgggatttgattctgccccactttccagccattaaattagcctgctactctctcctggagtaactgggtcagcggtggaaggcacagcaggcagtgtaggcattcacacatttgcgctgcttgccctccagtcccacagggaagtccccctggatgcagtggttgctttacaggagggggattgagttgggcartctgccctgcatagcaagcaggaagctcttggccctggagggagacattacctcatcctgcaaggttgctcgctacaaaaattatacggggaaatgagctgggttaagaggagtcaaggattggcagtcttggcacatccagcacgaggtgtgttggggcatgagaggtccgtggagtggtctgcccagcatctgcagcacaaagtaagagtttcataagagagtcattatacttactgaggacttagtatctgcttggcattgtctaggtaatttctagatagcaatgttcctgtgaggtttcatctctgcctgttttactgatgaataaactaaggcacaaaaggttagataagttggccatagtcacatagcaagtggcagagtcagcagcctggcttgagtccatgctcccagtgactgtattgtgccaacagttggtgagtttatttggttattgtgagttccatgggcactctgtgttacataaggcctggcccacattttaaaacattgttacagaaaatttcaaacaggtatgtagaatggtgtagtgaactttgaccatttgtcttagtccattttctgctgctacaacagaataccatagactgggtaatttataatgaacagaaatttattgacttatggttttggaggctggaagtccaaaattgagggctggcatctggtgagggccttcttgccatgtcatcccatggcaaaaaggtgagagttaaagagacagagtgagagcccagagggggccagactcatccttttacaaggacctactccctggatagcagtgcttttatcctccattcatgagagcagatccctcatggcctgatcaccccttaaaggtcccaccttttaatactgttaaatgggggattaagatgccaacacatgctttctggggggtacattcaaactgtagcactctacccagcttccacagctgtcatagtcacagccaatcgagtgttcttaatacaccacccattcacccttggtatatttcaaggcaaattccaggcatgccgtttttttctgtaactacatcagtatgtatatgaaaaagaaaagactctctttgaataaacctagccacaataccattatctcactttaagaggtgattaacaattccttaatatccaatattctgttgttgttcacatttccctgattatcttaccccttccccctgttttttacagcttcttggagtcattatccaaataagatccataagttgtgattggttgatatctcttaagtctcataatctttagatcttttctccatctcttttttccttgtaattttttgtggaagaaactgggtcatttgttctgttgagccttgcagtcgagatattgctaattatgtccccattagacacacacctctgtcacctgtgttttctgtaatttggcagtcaggcactgaagcctagtcaggtaaatgcctgcttattttctttgacttactagttttaaaaataatgaattggttcccaggtgacctgggtatcataacagacaaataggcccgccgggtgttgaggtttccacgctgcaggtgtcatccctacaatgctcaagtgtcccttttttgccagcgtgaacctattcatgttggctcctgagttctgttgacatgaccctggttgtctttgagtgattttttgctttctggtagaagatattgcaggcttctcttgtacatttccagccccggacctggaattggacatttctccaagaagccccgtgggaagtgttacttgctttcagagggagataggagttwgagacacctctaaagctgcatgaatttgatggtgcaggcaggacatacaggatgcagcctgatgggggtgtctcccctccaccttcagggctggttttcctgccttagtcccctctccccaggcgagggccagtgctttctgagcttctttgtctgtcctacaaggagggaaggatgtgrgtgtggccagtgcaggggggtatgaaggctgaaagctatcaaaacatggctctgctgcaggtggagttggaagcagtctcctacaagcaagaaatgtctttgatgtctctaattctatctaaaattcatgaagattttgctctctccctgtctctttctttctctcacacacacactgaaatagaaatgttccagtgactcactagttggaattacttcctggtggacacatctcccagatgtgccacatttattgcattgacgaggcaggcacttgcatgaactgtcgcatttgtacccacccttctgtgagttggatgttgccatctctcttttccatatgaagaaactgaggcttgaggtaggccagtgccatgacagacctggttctggtcttatttctgctcttggtctgtgatcttgggaaaggcctttctgaaatatgtcaagattaggggttcagatgaaggttcttctaaactccaaagttctgtgactcttgggaagagccaactaatgaaaagctttagagtcgggcacggcttgataccagggcctgatgcagttgcagcagctgtggaagtgrgtgtctttgagctggggatgtcgtggttccctgatgccagagcatgtgggtgacctactctgtgagtatctgttcccattcttgtcggtctccctccctttctcagatctttgccagcattgctccttccatctatggtcatgaagacatcaagagaggcctggctctggccctgttcggaggggagcccaaaaacccaggtgagcacccacctttcctctgcaggggtgttagcagctttctctttggggagccagcattcaaagaaggacacagtgtttttaaagcctgggtgctgggragaaagaatgcattaaaagatggtctrgctgggcgtgactcattcttcaagggagagggtggccctgagttgggcattctgggtgttgggctgttggtcagggagccagtgtctgcctgcttttgtgatttaagcaaatgagtctttgcttctcttctatgtaaaaaatactttgtcttttaaaaacctgttttaagtacaaaaatactattgacacatgagtttgtatttatattacacttttatagaacactaaaagtcatgggtgaggctgatttccccattgacccccacttctcttcctagtccctccctttgtggccatttacaattacacagcaamcacagggtttcatgactacacgtgtttatttgtacaagcgcagcgtcccctgtgtgtgcccagtgctgtgcctgtgcgcagtgcatcccaccgagctctcccgctcagtgccacactgcagcatcttttcttgttagtgcatacagagcaattgccttcttttaaatgactatcatgccaccagataacgcagtttatttagctctccctttggagaacacttagattgtttctgatatttcacattcgccaaggacatctcgtgcaaccctcctctgcacccgtgtgtgtttccctgggagtgcccagagtgggactgcatggcgtagggcattktatccctttctagagggactgtgccttaccattcctaacaagtaggttgaggaattggtgggggatgcaactgtgccctcctcctctcacttsccactctccccctcccccgcttctactcatcccctccaggtggcaagcacaaggtacgtggtgatatcaacgtgctcttgtgcggagaccctggcacagcgaagtcgcagtttctcaagtatattgagaaagtgtccagccgagccatcttcaccactggccagggggcgtcggctgtgggcctcacggcgtatgtccagcggcaccctgtcagcagggagtggaccttggaggctggggccctggttctggctgaccgaggagtgtgtctcattgatgaatttgacaaggtgggtccctgggtcacggaggctggtggaactcagggggtgtgtgtgggcttgggccttagcgacgggaatggtgttaatggggtccattgggacctcatcggagacttagtagtaggggcgtgaaccatgctaagggtgggccattttaatcttgcagatgaatgaccaggacagaaccagcatccatgaggccatggagcaacagagcatctccatctcgaaggctggcatcgtcacctccctgcaggctcgctgcacggtcattgctgccgccaaccccataggtgcagcaggcaccctgactgctggggctggggtgggacacagggaggtcccgcctgcttgaattgggagcccacggggtccccaggagccgatctgaggaagtcattgtgcagcagagggttcccctcttctgcatatcctgccagagtggggaacagtgaaagtgggacctgggacacctgggtttcctgttgagtcatgttcctggaatcaccttggatgttctcagaaggcatgggaggagagcccagtgcccctctggccaggatggagttggctgttggtctcagcagcgaatgcgtaaaagaacccaggctctgtcacccactgtgttcttggtttttcctcctggggaagcagttatgctttctgtctaaattaggctattttgggccctggttagggtaagctctttgctgtctcagacagcaggtgctaagtacccacctatgtcttcctcttccactgccctcatccccttctgccatcagagcagcctggggtccctgagatgggaggataggggaatccaccctgatggaggtgctcccctgtgtttcaggagggcgctacgacccctcgctgactttctctgagaacgtggacctcacagagcccatcatctcacgctttgacatcctgtgtgtggtgagggacaccrtggacccagtccaggtatagctcrcatgtgcccggtttccatgaactgtggtttggggacctcaggtgaggcttggggtcatacagtgtgcccaacacaggggacaggtgctgcaggggccataggctgttttctagtcctgttccctcggtctcttctcatgtccagaagtcgccctgatttctctttccttcacagcacccccgacccccaccctacataacccacaatccaccaaatcctgttgtcccaactcctgagcctacccacctccctcacttctgcctctgacttgaggcactaccatcatctgaactggcctcctggcacccatgtagactgtcttccagttgaaggcataaatcagatcagccccgtccttaacaactgcttgaggctttctgctgtcatcagaatagaatccagggtcctcccctccggcccgcacccgccatctctgcagctacctcctcctcgctcccttccctcacctgcacctgcacctgcccttctctctcaaaagggccgagccttggggcttgattgtgctccttgctcctggcagacgctctcccacactgtcacatgacttgcatctcattgtcgtcatctcagctccctgtctttcagggaggggctttgccgggcacccttagctagaggcatctccttggtcccttgatcctatcactctatttttcttctgagcattactttccataattaatttttaagactatttgtctcctgtccccttgtggagatgagccctgtggggactctgtcccattgtctggtttgccacccacacccagaactgcctggcacatggtcagtgtagtcagtcttgttgaaagagtgtcacccttgtagggcacactcagcccttctccagccactgacctccccaaagccacgcacacccacaatcagacccaccctctcatggcttatcttaggacgagatgctggcccgcttcgtggtgggcagccacgtcagacaccaccccagcaacaaggaggaggaggggctggccaatggcagcgctgctgagcccgccatgcccaacacgtatggcgtggagcccctgccccaggaggtcctgaagaagtacatcatctacrccaaggagagggtccacccgaagctcaaccagatggaccaggacaaggtggccaagatgtacagtgacctgaggaaagaatctatggtgagagcccaggcagagccrggaggtgctatgcagagaaggaagtgcagtgtgagccttctgaccaatgcagcgggggtggtggtcagtcaggccaaaaggtgccagagcagggaggcattaaaaaaaaaatgtaggtgccaggcacagtggctcacgcctgtaatcccagtactttgggaggccgaggcaggaggatcacgatgtcaggagtttgagaccagcctgaccaacatggtgaaacccaaaaattagccgggtgtggtggcacatgcctgtaatcccagcttctcaggaggctgaggcaggagaatcgcttgaacccgggaggcggagggtgcagtgagctgagatcgcaccactgcactccagcctgggtgacagagtgagactccatctcaaaaacaaaaacaaaaaatgaaagttgggtacagtgattcatgcctgtaatcccagcactttgggaggccaaggcaggaagattgcttgaggtgagttcaagaccaggctgggcaacatagtgaggccctttctctacaaaaaatgttttgaaacttagctgggcctggtggtttgtgcctgtagtcccagctactcaggaagctaaggaaggaagatctacttgagcccaggagttcgaggctacagtgagctatgatggcaccactgcactctagccttggtgacacagtgaaaccctgtttcaaaaaaaaaatatttttttaaatgataggtattaatatataccttaaccattttgttttagatgaaatttaaatgtgcattcatttgtctcagtgtagggccaaggccttaattgttgatgtgcttattaagttccatattgactttgtgtaaatttcactctaatgaacacaaggtctttggctcattcatagtggaatggaaacttaaagcagcttgcaagccatgggaatgccgagtccttgtagattgctgcctcagccacacccagtcaacacagcagcttttcaaatttctgccttttaactttaccaagttttttcagatcattcaatttagttttcctacaaacaacgacctttttttgcacttacattgtacaggattattcaatatttagtgtgtgacaataaccaatacagctggccacaaatacaacagcctctgagatgcacagaagtcagctggtgggagcagaactgtgcaggtgtgatggtgacaggccgtaagcatgcagcatccactggcatcctctgatttccaggagggataggaagtgtgcattcactgggcagcgcagtcaagcattctgcatttctgctggggcactgtcagatgggtcttcttggctctgggtgctaagagtgccgctgctttattttccttgcttctctttcctgcccgtgaaagacctgacactgtgcttctctccaggcgacaggcagcatccccattacggtgcggcacatcgagtccatgatccgcatggcggaggcccacgcgcgcatccatctgcgggactatgtgatcgaagacgacgtcaacatggccatccgcgtgatgctggagagcttcatagacacacagaagttcagcgtcatgcgcagcatgcgcaaggtgggtgtgctccgaggtaggggcctgatgggcaagctcagtgaaggaggccacacgtgggtatccagggctctggcctggacgtgcacccaggagcggcagcctgtctgacctgggtgctggcacgtagggtaaagggagtgtggcaggcgtagtgggagcgggtgtttgactgaggcttttttcctgcagacttttgcccgctacctttcattccggcgtgacaacaatgagctgttgctcttcatactgaagcagttagtggcagagcaggtgacatatcagcgcaaccgctttggggcccagcaggacactattgaggtccctgagaaggacttggtggataaggtatgggcccggaaggraggtgagggttggggtatgctgacttgggagctgccagtctcctgatgggggctccatcataatgggtcatgaagtgggtgggccttrgttgacagccatttattgaatgcttacagtctgttgagtccagttctgtgcctgtagtctgacagcaggggagtgaggtgagtcctgttactgccttcctgttgtgcagaggtggagacagatacagggcagccaagtaacttgtctcagtttacacgcacagcttgtacagcagagatttgaagccccttaatcggcctctccacccctggatattttcctcccataaatggaggtgatggtgtctgaaagtgcactgtaactggggcgctctggaaacagcctgttctcacaccactgatggctcactggacacttcctccttgcaggctcgtcagatcaacatccacaacctctctgcattttatgacagtgagctcttcaggatgaacaagttcagccacgayctgaaaaggaaaatgatcctgcagcagttctgaggccctatgccatccataaggattccttgggattctggtttggggtggtcagtgccctctgtgctttatggacacaaaaccagagcacttgatgaactcggggtactagggtcagggcttatagcaggatgtctggctgcacctggcatgactgtttgtttctccaagcctgctttgtgcttctcacctttgggtgggatgccttgccagtgtgtcttacttggttgctgaacatcttgccacctccgagtgctttgtctccactcagtaccttggatcagagctgctgagttcaggatgcctgcgtgtggtttaggtgttagccttcttacatggatgtcaggagagctgctgccctcttggcgtgagttgcgtattcaggctgcttttgctgcctttggccagagagctggttgaagatgtttgtaatcgttttcagtctcctgcaggtttctgtgcccctgtggtggaagagggcacgacagtgccagcgcagcgttctgggctcctcagtcgcaggrgtgggatgtgagtcatgcggattatccactcgccacagttatcagctgccattgctccctgtctgtttccccactctcttatttgtgcattcggtttggtttctgtagttttaatttttaataaagttgaataaaatataaacgctggtatctgttggcttccattccgctttagtaagtaacctggacttccgctgaaggccctttccaccttctccgttcagagttctgtaggaggtaggtcgggttaaaaaagctgttttgtttgtggatgtagagaaagcaaaaatgatatagatatccccattgaacttggtttgcagtcactgcctctgtgatatctaagtggaatccatggaaatcctagttagacgtgtataggactagaggtggtgtagcctaccccacagtggggcagtaccatccaccacctcacccagagatgaggtgccggagggacctcatcagcctcagctgatgggctgccgsagggattgcagttcccagatggggttctgacatctgtcttgtccaagttttcccttcttgaacttttttttttttgaagtaagttttcagtcgcccaggctagagtgcagtggtgcaatcagctcactgcagcatcgacctcccgggctcaagcaatcgtcctgagtagcctggactacaggcacacaccactacgcctggctaatttaagtttttggtagagatgaggtctcactcactatgttgcccaggctggtcttgaactgggctcaagcgatcctcccatcttggtctcccaaagtgctgggattacaagcctgtgccaccatgctcagcctggagttactttttaaaggaaaaggtgccagccacaggaaaatgggctgaagcatagggcagggcaaggattgaggccagagtcaggcaggtcacacaggacttgtgctctaaggaggctctagtctgccacagcaggcagccagcaagagggtgttcaggacagcagtggtccagtggtcttggagagctggctggccaccaaatcatactgagaggagaaaggacggaagagtggagacttgggtgatggagatgggggaaagtggacataggtgtattttgcaggtagattagacaagatgtagtgatgagtaagatgtaggggtagggcaaaaaggaaaaaccctggatgaccaggtctgtggctggggaaataggttgaagtttagtagggaaagccaggagtttcatttcagacatgttggctagacaggccttttagacatccaagtagaaatgtgaagtctgcaggcaggttgagtcgaccactgagcagaggtgtgggcatgaggagcggtcatcatagctgccactgtggggctaagtgccatcacccccagagtgcacagagaaatgatccaggctgggtgcggtggctcacgtctgtaattccagcactttgggaggctgaggtgggcggatcacatagtcaggagttcaagaccagtctggtcaacatggtgaaacccagtctctactaaaaaaatacaaaaattagctgggcatggtggtgtgcgcctgtaatcccacctacttgggaggctgaggcaggagaattgcttgaacctgggaggcagagggtgcagtgagccgagatcgtgccactgcattccagcctgggcgacggagcaagactccatctcaaaaaaaaaaaaaaaatgatctggaaggctacgtgacacccatcatttgaaacagcaaaggagacaggaggaaaatgtggcagaaaaaccaggggagaagggtgtctgtggaagccaggagaagaagaaatttccagaagattgaggtcagttggccaacgtagctgaaagatcaggtgaaatgacaaacctgcccactaccatgtttcattgaatataagatgccattgaagataagaatcaccattttatgtgcttctgaggaaaaaatgtaaacatttataatgatgtcatcaaccttcagatgtcctttttttatttatttatttatttagagacggagtcttgctctgtcgcccaggcttgctctgtcacccaggagtgcagtggcacgatctcagctcacagcaacctccgcctccagggttcaagcaattctcctgcctcagcctcctgagtagcttggattataggcctgtgccaccatgcccagctaattttttcttttttttgtatttttagtagagatagggtttcaccatgttggccaggctggtctcaaactcctgacctcaggtgatccacccacctctgcctcccagagtgctgggattagaggtgtgagccaccatgcccggccagacatcccagtttagatgtgcacctttgaaatacaagctttgtggtaatgtgggagttgctgtagcctcgtccagcagtttcaatcccttggtgacagtggaagccaggttggagtgcggatagaataaacaggaggtgaggaggtagaaactgctcatggagaaaacgcgtgagaagtttggctccaaggggcgtgtgaaatgggacagccaacaaggtatacaggaccacagtgaggcttttccgttgatgtttactctaagactggaaaattagattttttttattcatgcgatagaatttattaatggattaatttgaaagataattatgagtgaaaaaacaagatgtgatacatatatgtaaacatttaaaacataccgatattacataatgtgtgtgtacatacgtgtgtgtgtgtgtgtttgtatgttaaggataatttacgccagcaaggtggctcatgcctataatcctagcactttggggggccaatgagggcggatcactggagcctagcctgggaaacatagtgagaccccatctctacaaaaaaataacaacagttagctgggcatggtggcacaaacctgtaatcccagctactccaggagctgaagcaggaggatcacttaagcctgggagagcgaggctgcagtgagctatggtggtgccctggcactccagccttggtgacagatccagaccctgtctcaaagaaaaaaaaaacaagataaaatgtgagcttgggtattcttgtgttttttacaggtttattgagatatagtttacataccacataatttaaaatgtacaacttggccgggtgtggcagcacacacctgtaatcccagctactcaggagtctgaggcaggagaatcgcttgaacctgggaggcggaggttgtagtgggccaagatcacaccactgcactccagcctgggcaacagagcgagactctgtctcaaaaataaactaattaattaattaaaaaatgtacaattcaatcgttttagcatatttgcagttgtgcaaattatcacacttttaaaacattttcatcactcccttcccccaaaaaacatacccattagcagttactcctcttccttccccaccagccctaggcaaccactaatctgctttctattgctaaagatttacctattctggacatttcataaaaattgaatcatataatatgtagtcttttgtgatgggcttctttcacttagaataatgttttcaaggttcatccacgttgtagcatgtgtcagtactttctttgtattgctgaccaacatgccattgtatgggtatgctacattttatttatgcattcatcagttgatgagaatttgggttgtttccaccttttgattattatgactaatgctgctatgaacattcctgtaatgtatttgactagacatatgttttctatgctcttaggtatgtattaggagtggaattatgaagtcatatggtaactctatgcttaatcttttgagaaactgcctatgtccaaagcagctgcaccattttacattcccatcagcagtgtacgaggagggttctttctccatatcctatataacacgtggtctctctttttaattctagccacccaccttagtgagacgcaaagtggtttccttttttttgagacagagtctcgctttgtcacccaggctggagtgcagtggtgtgatctcagctcactgcaacctccaccccctgggttcaagcaattctcatgcctcagcctcctgtgtagctgggattacagtcatgcaccaccatgccagagtaatttttgtatttttagtagagacagggttttgccatgttagcaaggctggtatccaactcctgacctcaagctatccacccagcccggcctcctaaagtgctgggattacaggcgtgaaccaccgtacccagcctgagaagtggtttcttattgtggttttgatttgcatttatctgatggttaatgaggctgagcatgttttcatgtgcttattgacatttggaggaatgtatattcagatctttgtccattttaaaacattgagttgtctttattactgacttgtaaaaattctttgtatattctagatacatgatttccaaatgtttcttcccattctgaggattgccttcacttaaatttttgtttctttttttgagacagagtctcactctgtcacccaggctgaagtgcagtggcacaatcatagctcactgcagccttgaactcctgtgctcaagcaatcctcccacctcagcttcctatgtagctaggattacaggtgtgtgccaccatgcctggctaattttaaaatttttcatagagatggcatcttgctttgttgcccaggttgatcttgaactcttgggctcaagtgatcctcccacctcagcctcccaagtaggtaggactacagacatgcaccactacacctggctaattgatttacttagagatgggggtctcaccatattgccaaagctggtctcaaacccctagcctcaagtgatccatcctcctacctcagtctcccccaagtagctgggattccaggcacatgccaccacccctggcagctttagagttttcttcatttggagcttacatatctggtttggtttattccagtttttaataattgttgctgtgattgcgatcttttctcctactacattttctaagtggttattgaggatacacagaaaagctattgatttctgtacgttatcttttattcagcaatcttgctgaactcattggttttcaattattttgccaactgatgatcttgcattttctagataaacctgcaaataatgagttttcccccaatactttcatcccatttcttctatcaggccttgttgcagtgtctcttatagaatattcaatcattgtggtggtagtgaggattattttgttccattcacttaaaagagaatgtttctaatgtttcatcattaagtatggtttcaccattaagtatgataataaaggtttctgggagatacccttaatggaattgaggacgtttccttccatttcttgtttgcttctaagatctttgtttcttgtaacagaaaaacaaaacaaaacacaacaaaaaaccaaagggatgctcctttcatcctcagaggaggaaagaagagggaagctgggtctagacacaccctggatttctcttttccaagcccagctgacagccacttttctagtacccctaacacccaccaaataaaaggtgctacattttgctcatgttctttcttttgtctggaacccatttcttccctatgctcctccaccccaactcctatttctcctaagtattaatatttagtctggaagagtcccgtgagattatctccaatgtctgatgctatacccctgcataggggggtggggatatactttgaaaaagcatattcaaataacgatttgttattttaaagaagtgttttcctaatatggtatatataaagtaacattccacaaaattgtggttgctgtatatttaagctgcagtacttctaaaagggtagtcggggtttttctctccctaaaagaggctgagcttctttctaactcaggaactctatcagtgagcttttccctctgccttgtaagttctctcccaaacccaatctcctacctaatacccactcatccttccagatgccagccagcttaccttaaatgctgtttcttcaggaaggcaagcataaggttcccctctgtgctgtctcctagccccttatactccttaacagacc

SEQ ID NO: 95860 - DNA, 35932 bp, Homo sapiens
  misc_feature (1)...(35932): n = A,T,C or G
gtttgtaggagtggaccctgccactggccccatcggagccggaaagccaaggaggaagggacagagctagaatcagtgccactttgcagcagcaaggatccagaygaagtggaaacagagagcaggggccctcccaccacctctgacctccttgccccagacctgctggagcaaggggactggagcctgtcccagaacaagagcgccctggactgccctcatcagcacctagacgtaccgcacgggaaggaggagcagatctgctgacctcagggcctgacagtgtgggacaggctcttctttcccaaaattagggagctcttgacagaaagcagttctgatgcttacatctggaatctgaggcatcctctgactccactcaaagagggtgagggccttcttaagatacaaatggcggaggattgctgccagagaagtctggtcagagccacagggtctgcctccagccaaacgggagcttttggtgagaaggtgttggacaggggattggcgccccctttgggttggcctccatcctctttttttttccccttaacactatccgcctggaaatgggctgcctctctttttttttttttttttttttgagacatagtctcgatctgtcccccaggctggagtgcagtggcgtgatcttgggcaagcttttgtgttctgtgtcattttttttttttttttgagatggagtctcactctgtcgcccaggctggagtgcagtggcgtgatctcggtttactgcaagctccgcctcccgggttcgtgccattctcctgcctcagcctccagagtagctgggactacaggcacccgccacaacgcctggctaattttttgtattttttagtagagacggggtttcaccgtgttagccaggacagtctcaatctcctcttgatctgacctcttgatctgcccaccttggcctcccaaagtgctggaattacttgcgtgagccactgcgcccgggcgcctctttttttttgaggtgaagtttcgctcttcttgcttaggctggagagcaatggtggatctcggctcactgcaacttttgccttccaggttcaaacgattctcctgcctcaacctccgaagtagctgggattacaggcatgtgccaccacgcccagctaatgttgtatttttagaacagacgtagtttctccatgttggtcaggctggtctcaaactctggacctcaggtgatccgccagccttggcctcccaaagtgctgggattacaggtgtgagccaccgctcctggccgggctgcctctttaataccatcatttgagttctctaaacgtgaattctttctaagaaaaccctcagaacaacaaatatttactgagcacctacaggtatgccgtatactgtgtgagcagctccaagagaattccaaggtaaattcgcaatgtaaacatcattttatatgaggacaaaattatcttggattatatatgcctaaagtaatacacacttagtgccacttgacagcacaagttacttgaaaaattacttgacatacaatattaaacagatcaacaagacagaaggttaacaaggatatccaggacttgaactcagctctgcaccaagcagacctaatagacatctacagaactctccaccccaaatcaacagaatatacactcttctcagcaccacatcacacttattctaaaatggaccacataattggaggtaaagcactcttcagcaaatgtaaaataacataaatcacaacaaactgtctctcagaccacagtgcaatcaaattagaactcaggattaagaaactcactcaaaaccgcacaattacatggaaactgaacaacctgctcctgaatgactactgggtaaataataaaatgaaggcagaaataatgatgttctttgaaagcaatgagaacaaagacacaacataccagaatctctgggacatatttaaagcagtgcatagagggaaatttacagcactaaatgcccacaagagaaggcaggaaagatctaaaatcaacaccctaacatcacaattaaaagaactagagaagcaagagcaaatacattcaaaagctagcagaaggcaagaaataactaagatcagagcagaactgaaggagatagagacacaaaaaacccttcaaaaaatcaatgaatccaggagctggtgttttgaaaagatcaacaaaattgatagaccgctggcaagactaataaagaagaaaagagagaataatcaaatagatgcaataaaagatgataaaggggatatcaccaccaatcccacaaaaatacaaactaccgccagagaatgatataaacacctctacgcaaataaactagaaaatctagaagaaatggataaattcctggacacatacaacttcccaagactaaaccaggaagaagttgaatctctgaatagaccaataacaggctctgaaattgagacaataattaatagcctaccaaccaaaaaaaaatccaggaccagacagattcacagccgaattctattagagctacaaagaggagctggtaccattccttctgaaactattccaatcaatagaaaaaaagagactccctaactcattttatgaggccagcatcatcctgatactaatgcccggcagagacataacaaaaaagagaattttaggccaatacgcctgatgaacattgatgtgaaaattctcaataaaatactggcaaaccgaatccagtggcacatcaaaaagcttatccaccacaatcaagttgggttcatccctgggatgcaaggctggttcaacatacacaaattgataaacgtaatccatcacataaacaaaaccaatgacaaaaaccacatgattatatcaatgcagaaaaggccttcgacaaaattcagcagcccttcatgctaaaagctcgcaataaactaggtattgatggaacgtatctcaaaatagtaagagctatttatgacaaacccacagccaatatcatactgaatgggcaaaaacgggaagcattccctttgaaaaccagcacaagacaaggatgccctctctcaccactcctattcaacatagtgttggaggttctggccagggcaatcaggcaagagaaagaaataaagggtattcaattaggaaaagaggaagtcatattttccctgtttgcagatgacatgattgtatatttagaaaaccccattgtctcagcccaagatctccttaagctgataagcaacttcagcaaagtctcaggatacaaaatcaatgtgcaaaaatcacaagcactcctatacaccaataacagacaataacagagagccaaatcatgagtgaactcccattcacaattgctacaaagagaataaaatacctaggaatccaacttacaagggatgtgaaggacctcgtcaaggagaactacaaaccactgctcagtgaaataaaagaggacacaaacaaatggaagaacattccatgctcatggataggaagaatcagtattgtgaaaatggccatactgcccaaggtaatttatagattcaatgccatccccatcaagctaccaaagactttcttcacagaattggaaaaaactactttaaacttcatatggaaccaaaaaagagcccgcattgccaagacaatcctaagcaaaaagaacaaagctggaggcaccacgctacctgacttcaaactatactacaaggctacagtaaccaaaacggcatggtactagcaccaaaacagatatatagaccaacagaacagaacagaggcctcagaaataacaccacacatctacaaccatctgctctttgacaaattgacaaaaacaagaaatggggaaaggattccctatttaataaatggtgccaggaaaactggctagccatatgtagaaagctgaaactggatcccttccttacaccttatacaaaaattaattcaagatggagtaaagacttaaatgttagacctaaaaccataaaaaccctagaagaaaacataggcaataccattcaggacataggcatgggcaaagacttcctgactaaaacaccacaagcaatggcaacaaaagccagaatagacaaatgggatataattaaactaaagagcttctgcatggcaaaagaaactaccatcagagcgaacaggcaacctacagaatgggagaaaatttttgcaatctacccatctgacaaagggctaatatccagaatctacaaagaacttaaacaaatttacaagaaaaaaaacaaacaaccccatcaaaaagtgggcaaaggatatgaacagacacttctcaaaagaagacatttatgcaaccaacagacacatgaaaaaatgctcatcatcactggtcatcagagaaatgcaaatcaaaaccacaatgagataccatctcatgccagttagaatggcgatcattaaaaagtcaggaaacaacagatgctggagaggatgtggagaaagaggaacacttttacactgttggagggagtgtaaattaattcaaccattgtgaaagacagtgtggcgattcctcaaggatctagaactagaaataccatttgacccagccatcccattactgggtatatacccaaaggattataaatcatgctgctataaagatacatgcacacgtatgtttattgtggcactattcacaatagcaaagacttggaaccaacccaaatgtccatcaatgatagactggattaagaaaatgtggcacatatacaccacgaaatactatgcagctgtaaaaaggatgagttcatatcctttgcagggacatggacgaaactggaaaccatcattctcagcaaactatcacaaggacagaaaaccaaacaccgcatgttctcataggtgggaattgaacactgagaacacttggacaaagggcggggaacatcacacacgggggcctgtcggggactgcggggctgggggagggatagcattaggagaaatacggaatgtaaatgacgagttgatgggtgcagcaaaccaacatggcacacgtatacctatgtaacaaacctgcacgttgtgcacatgtaccctagaacttgaataaaaaaaaaaaaaaaagaaagaaaaattacttgacatatcttgacattttaggctcccaggattttacagtattcttaacaggttttgtcagcaaaatcaacccccacccccgcatcagtttaagagccctggaaggctctgcctattcaccagcatagagctgagatccttaaagggccagttcagggcactgctccagcaaccgttgcgctgctataagcttgagcacatctcttgcccctcctctctacttttatagatcctgcatttatttagcatataatcttttcaatattgactttgtatatgtatgtcttcccctaaactggatgtatcttttaaggaaaagcctggggttcgtcatccccctatgtatcacctttacaggcggtcacccaaaatctccacattcatcatagaaacagaaattccactaataaatgtcaggtactgcctccttaaccttggtccgctatttccctcccactttcagcagtctggtttattccatgggtggaagaggaagccaagttggctgagtgtgaagggaatggcgtcagtgtgacttcacgccacatcgtcccgaatgccagctccacactgcggtggcacgaacgcaggattgagagatgcagctggagtaaagagagaagcccatgtccctcagacgccacacaaaatgggggtaaccgcgagaacaaagcagggtacccaactgggtgtggcgggacacctgggcgcacgccgccagcgcccgggagagcgaaggcggggagagaggaaccacgctgaggcgtggcaggatgggggcgggacttccggaagccatttggctgagtggcaggggaaccggaagtggaggagctgctgctggtgctggggccggaggagggackcgccggagcgggaccgacgggaccgagcgagcgaccgacgcgccacccgccgacgcctcagccgcttggggcccgcacggaccctctacttcagtgagtgcatccagggtcgcagggaaccggtggcttagaggcgggggtcggaaggggctgygaggtgttattgtgagaggcccgcgacctcccctcccccaccmttgcggcccctccccccacgccgccccatccacttggggggggcctcgcgagcgcgcgccttctctgcgggcccagcgtcggcttcccagcagccggcgcagctagttttcgctctgagagccctttcccgatattccataccgaaagctggcgtttctcctcagccgccggccggcgcctccacggcctttcccaggagggtagcgcggcgggcgccccgccccgccctgccctgccctgccctgccgggcccacccgcggtaggccttgcgcaccscagctcgccccggctgggcgctgcagctcctgcccgggtctccgctgctgccttttccctttatcacaggggtctaacttctcactcttctctcccctcgcgtctggtcggaggccaaaaccagttactccgttgtgtttttaccgagcacttttccctcctccttttgttgaaaaatttcaactctttagaaacttctccgttgcctcttaggatgtgtttattcaaaagttgcatagaccgtcaccactcggaagggattatttcttggaaggctttccagcccccatctcatcttagacatgaatgtgctcggagcggctggtgacctgcccaaggtcagccagctagataaacctgtcagcggagaggtttggggggatgtttttttcctggctcaccgtccgtttgccagatccgtgccttctggtctacaggtttgattgacccgttgcgtggtgactcatgcttctgcttttcatagctcgcaggccagcgttgcttttcagaatttatacacaaacaagaactaacactcggagctttcgcctctttgtagagcttacccgtagagaaaggaaagaccacccggatccaccctaggacctcattttgtacagcttgaaattatgggaaggggttgggccggggggtaaaggtgtggagaaagtggaaggagaaagtgcttaattaagattgtctttgccttggatgtgccttgtgtctttggcttcttctgggcacattgttctgacataaaggttgcctccttgtgggggagaaggggaggattagtttgttggcttgggcatttgatcataaattatggaggtgctggaccggaggaaccacccaccagcccacggaggctaccgggcattcaggataagggccgccttcttcttcagaataaccatacccactccctctgaaayaaagtggagagtcttaggtctgagtggaaactctaaatcttttaattcttggttcaactttcttcatctgttttcctggttcagactaaaacatctaactcagctggagaagttataacgctttgttgttggacgtggtttctcattaaatacattgcactatgctggtataagcacttggaaattctagtgctgtattgtcatagtaagtagagaatatagaaaaggcaggaaaatcgtgcaagtcggttactcctcgtcttcccagagaactcactttaatggacaacaaagcttcccctggagtacagtctgttgtggcaaattaacaaaacttgttcttcagaccttttatttgcattctgcttggtctttctttctttttttttttttttttttgtgtgtgtgacggagtctcagtctgtcgcccaggctggagtgcagtggcgcgatctctactcactacaacctctgcctcccggttcaagcttataggcatgtgccaccacacccagctaattttgtattttttttttttagtagagatggggtttcgccacgttggccaggcaggtcttgaactcccgacctcaagtgatccacccgcctcggcctcccaaagtgctgggataacaggcgcaggaaacccaaagtcactcagaagtttgcgtcttaccactgggtagctcttagttcgttcttattttatgtgtccataagagcagataattcttcgtttcaattggaaagaatacaacagctggagcctgagcaacatggcaagacctcgtctctacgaaatttaaaaattagccatgtgtggtggcgtgggcctgcagtaccagttactctggaaggaagaaatgggaggatcacttgagcccaggagatcaaggctgcagtgagctgtgttacgccacttcactccagctaacgactgactgagaccctgtcggggtaaaaaacaaaaaacaaaacacagccggctgggtgctgtgactcatkcctgtaattccagcactttgggaggccaaggcagcaggatcacttgagcctaggagttcaagatcagcctgaacratatggtgagatccccatctattggaaaaaaaaaaaaaaaggtcaggcagctattcgggaggatcgcttgagtgcaggaggcggaaactgcagtgagccatgatttctccactgtgcttcagtctgggcwwcagagtgaagccctatctcaaaaaaaacaaaaaaaaagccggccgggcgtggtggctcacgcctgtaatcccagcactttgggaagccaaggtgggcggatcacctgatgtcaggagttcgagaccaccctgaccaatatgatgaaaccccgtcttcactaaaaatacaaaaattagctgggcatggtggcaggcacctgtaatcccagtactcgggatgctgagacgggagaattgcttgaacccgagaggcggaggttgcagtgagccaaggtcgcgccgttgtactccagtctgggcaacgggagcgaaactctgtctcaaaaaaagaaaagccagtttaatttttatttttgagacagggtcttgctctgtccctgaggctggagtgcagtggcgcaccaccacccccagctaattgttgtggtttttgtagagacacagtttcaccatgttacccaggctggtctcaaactcctgggctcaagcagtccacctgccttagtgtcccaaagtgctgggattacaggcatgagacactgtacccagccacaacagtttctctgatttccaaattgttttaatcctctatatgcatagtcttctaggttgtgcatttccagctttgttcttaaagaggagattgtgtgagtttgtggctcagtttttcttttcctggtgtttaaaaatgttaccaagccatgggcatcagtaaaactgaaagctgctttgtaataagattttgattgacaaaataatacaaaatcagagtcagaagacacaaagaaacacatttctgctcagatactttgccattgtaggggaagaaggatcaccttgtattcatagctatagacaaaaagactgtgtaattaggaatattttgtgacctcccagttcttcctgccttgtagcttcagataagtgacattttgttcctcggtttctctatgtgtatgctttttttattttcccatgaagaaatttagggttgagatggaagtgttttgctcagggtatcagaatgccattaaatttgggtagtagaaagtataagtgaaacaacttagtaaattagaattagaatttatcttttttcttttttttttcttttttttttttttagatggagtcttgctctgtcacccagagtggggtgcagtggtgtgatctctgctcactgcaacctccacctcctgggttcaagagattctcatgcctcagcctcctgagtagctgggattacaagtatgtgccacccaacctggctaatcttttgtatttttagtggagacaggatttcaccatgttggccaggctggtctcgaactcctgacctcaggtgatcctcctgcctyggcccccccaaaatgctgggattacaggtgtgagccaccatgcccggcctctatgtagtcttttctaatcagaacataatatcatttgctcaagagtaggctttggaagtctgtcactctggtttcaaatcccacctgtcctgtgttgtttaccagctctgctgtcatggagaagtttccttaggtctctttgagcatcatgtttatttaaataacaaagctcctagcacagggtctggtaaatagtaagttcttaataaatgttattttagatcagttgtttgtctgttggatgaactctgaaaatccatgcctgtttattgaattgtagctctaagctgggagtggtagtgtgtgcctgtagtcccagctacttgggaagctgaggcaggaggatcacttaagcctaggagtttgaatccagcctggacaacatagtgagacccttctcttataataataaagagatcgtataatttatatagatcattggtcttgaaagagtgtgtgtatgcacctctggggatgcataagatgatccattggaatataggaaaaaaatctcagaacatttatttacttagagacaaggtctcactgtcactcaggcgggagtgcagtagcatgatcacagctcactgcagcctccacctcctgggctcgagcgattctcctccctcagcctcccaagtagctgggattacaggcacgcaccacaacacctgccaatttttttttttttttttttgtatttttagtagagatggatttcgcctttttggtcaggctggtcttgaacttctgacctcaggtaatctacctgcctcgggctcccaaagtgttaggattacaggcgtgagccactgcgcccagcccaagcaatcctcctgactcagcttgctgagtagctgagactgcaggcactaccatgccaggctaatttcttcaattttttgtagagacggggtctcattatgttgcccaggatagtctcaaactcctggattcaagtcatcttcctgcctcggcctcccaaagtgctgagattataagtgtgagccgccacacctggctaaaatctaactttttaaagaatttaatttaaaaaaagttttctaatcgttttttttttttttttttttttttttgagatggagtctcgctctgtcccccaggctggagtgcagtggcacgatctcggcttactgcaagctcggcctcccaggttcacgccattctcctgcctcagcctcccaagtagctgggactacaggtgcccgccaccacgcccagctaattttttttttttgtatttttagtagatacggggtttcaccatgttagccaggatggtctcgatctcctgacctcgtgatctgcctgcctcggcctcccaaagtgctgggattacaggtgtgagccaccgtgcccggccaaaagttttctaatctataaaaggaaaaaataggcttcactataatttaagattcacatgaacagtaattggcatgtttatatacaaatgtgtaggtagtggggtgcatttcaaaaataccctaggctgggcaggattctaggccgagctcaggagttcgagaccagtctgggcaacatggagaaaccttgtctgtataaaagaaaaatagaaaagttagctgggtgtggcggtgcatgcctgtagtcctggctacaggccaggacttcacctcaaaaacaaaaaaaagaccttgtctcaaaaaatttttattaactaacatgtaagttttaatttgatttaagcctagaattgaacttagacccaaataaacttttatgtagaaagtatagaatgttttactggtttaaaaataaagcaaaacctcccacattgtttaaattaataattttttggttgttgtttgtttgagatgaagtcttgctctgttgctgcaacttccgcctgccaggttccagcgattctcctgccccagtctcctgagtagctgcagcttacaggcgtgttccaccatgcccggctaatttttgtattttttgtagagacgggggtttcaccatgttggccaggctggtcttgaactcctgacctcaagcgatccacctgctttggcttcccaaagtgctwggattacaggcatgagccactgcacccagccgatgatgttgttttttttttttgaaatcatgatgatattctagtatcatttagaactgagctaatttgtttgcataattagtgttagtattatttgcttctgtaatttatttttcttgagtgaaggtatgctttcacgtttggggcttggtacttggtgattctaaaaaactactgctttggcaatgtagtgtgttttgtgtactcagtaaatatgtatattgaatgaatataactcgatcttctttctgagaaagcttagctgtatttgaggatggcaagggaaagaaaaagattgcttatatagaagatgacctccttttcttcaggagatcgagaccgtcctggctaacacggtgaaaccccgtctctactaaaaatacaaaaaaattagctgggcgtggtggcgggcgcttgtagtcccagctacttgggaggctgaggcaggagaatggcgtgaacccgggaggcggagcttgcagtgacccgagattgcgccactgcactccagcctcggtgacagagcaagactccattctcagaaaaaaaaaaaaaaaagatgaccttcttttctataaaccgcaaaaccccagatatttttccttttcatagtcctttgcatttggagtttaatgtttctattgtatattctgcagaattgattgaaagtaatctggtttcttatttgtctttctatttatagaagattagcacttctaattttgcggaattttacttgctagatgacatatttggacttatcattactaaaattttttctttttctttttttttttttttgagatggagtctggctctgtcacccaggctggagtgcagtggtgtgatttcggctcactgcaacctccgcctcccgggttcaagtgattctcctacctcagtctcctgagtagctgggactacaggtgcatgccaccatgcccagctaattttttgtatttttagtagagacggggtttcactatgttggccaggatggtctcaatctcctgaccttgtgacctgcctgccttggcctcccaaagtgctgggattacaggcgtgagccaccacacccagccatcatttctaaaattttcttagtggaaacttgcaaaaataaaaatacctagtaaacatttgtcgaaaaccagtgccaaggcctatgactacttttgtcataatctgtcctacagttatttgtgtgatgtttatttagtaaccagtggattataatcattgcagtagtaattctgtaagtgttttttttttgagacagagtcttgctcagtcgcccaggctggagtgcattggcacagtctcggctcactgcaagctccacctgcacctcctgggttcacgccattcttctgcctcagcctcccaagtagctgggactacaggcgcccgccacctcacccggctaatttttttgtatttttagtagaggcagggtttcaccatgttagccaggatggtcttgatctcctgacctcgtgatccacctgccgcctagcctcccaaagtgctgggattacaggtgtgagccactgtgcagggccagtaattctgtaactcttaacagtagtaagtgtgtaactcttaacagctgaaaagcctctgatgtagatttaattgtactgtaagtgtctaataactccttgtgtcacttggtacttacagtaacatataatcacaaaaaactaatataggtataaagtatatacttggaggagattttttaaatgtactgcactgcaactaagtcatattcaaagctatctggcggtttagtggtgctatctttatgggacttagtcatgttctgcaattcatctctacagaaagtaattgtttctgtttagtttcccaattgtttctaggcaaaccacataaaactttaattattatttaaagcctgatgtgtataatatttaagtggtaacaaaccttcctgttaacaaatgaaacatgacatagacgttttttctcaggtgtagaatgagccaaggagactcaaacccagcagctattccgcatgcagcagaagatattcaaggagatgaccgatggatgtctcaggtaaaaggaagtgcatgtgtatcattcacatgagttgagtctccagttttttgtctgttttgttttagtttttgagacaaggtctcactgtgttgcccaggctgatctcaaactgcagggctcaagtgatcctcccacttcagcctcccatatagctgggactagtggcacatatcagtatgcctggcttcttcaattattttaaggtcttttgaccaaaactgcaaaggggcaattaaaaacaaaacaaaacaaaactctaggctgggcatggtggctcacgcctataatcccaacacttggggaggccgaggtgggcggatcacaaggtcaggagtttgagaccagactggccaatatggtgaaacccgtctctactaaaaataagttagccggttgtggtggcaggcgcctatagtcccagttactgaggaggctgaggcaggagaatcgcttgaacccaggaggcggaggttgcagtgagccgagattgtgccactgcactccagcctggcaacagagcaagactgcatctcaaaacaaacaaaaaacaaacaaaaaaactgtaaccttgtgacccgtgacaggttgtacaaagggggattttaatagtcaacaagaatttgttactgtaagtaaaaatgtaatgttacaaatgtcctgcctcttcaccattctgatgttggaactgggaaatattttaagtttttttattttgcagtaatttcaaaactacacaaatgttacagaaatttagaaagaagtatcttcatctagactcaccaattgttaacattttaccgtatctgcctaattattgtgtctgtatctattttgttttagttttttttgttgttgttgttgttggttttttgagatggagtctcactcttgcccaggctggagtgcagtggtgcaatcttggctcactgcagcctccacccccctgccaccctgggttcaagatattcttgtgtcttagcctcccaagtagctgggattacaggcgcccgccaccacrctcagctaatttttgtatttttagtagagacagggttytgccatgttggccaggctggtttcaaactcctgacctcaagtgatctgcctgtctaggcctcccaaagtgctgggattacaggcgtgagccaccatgccctgctgtgtctatatctatttctatatgtatatactaacgtagtgggtttttctgaagcatttgcactcatttcccttacccctgaatatttcagcatgttttcttaaaaacaaggacttttcttaaataactataggatagttattaaaatcatgagatgtaatattgatataatactattattacttaatccaaagaccatattcagatttctccagttgtcccaatatttttttcttttctttttttttttttaagacagggcagtatacagtggctcatgcctgtaatcccagcacgttaggaggccagggcaggttgggaagtcaaggcgggaggatcacttgagcccaggatattaaggctacaatgaactataattgtgccactgcactccagcctgggtgacagattgagaccttatctcaaaaagaaaaaaaaagaagtataccacagttgatttgcccattttttctttcatggacatctggatcatttatacctttatgaatagtaactaggccaggagtagtgactcacacctgtaatctcagcactttgggaagctgaggcaggtgaatcgcttgagcccaggagttcaagacgaaggaaaggaaaagaaaagaaaagtagtaactaaactagatatcttcattattcttgtcttaagttaataggcttcaatgagctctggctgtagaaaaatcagtcaaatggaagaaaaacacaaatattttaaaaatttttttggagacagaatcttgctctgtcaagcatgctggagtgcagtggcaccattacagcttgcaccattacagcttgcaccattactgcagccttggcttcccgggcttaagtgatccaccaccgcttctcaagtagctgggaccacaggtgcatgccaccatgccgggctaattttttttattattttttgtggagatagggtctcactatattgcccaggctgatgatcttgaactctcggcctcaagtgatcctcctgcctcagcctcccaaagtgttgggattacaggcatgagccaccgtgcctgactttaaaaatcttttaagcattgcatactgaaatatttatacttggaatgatatatcctcagtttgcttcaaaatagtctggggatggagtggggcagtagttgggagtatgactgaaataatgcaggccataaatgattgctgtagctggtaattgatacatggaggtttattctctctgaatggagatgttattctctcggcttttgtatacatttgatattttgcgtaataaaaaggttttgttttgtttttgtttttgagatggagtctcactgtgttacccaggctgaagtgcagtggtgtgatcttggctcgctgcaacttctacctcctgaatagctgggattacaggcacccacctccatgcccggctaatttttgtgtttttttagtagagacgaggtttccccgtgttggtcaagccggtcttgaactcctgacctcaggtgatccacgcaccttagcctcccaraatgctgggattacaggcgtgagccaccacatccctggcctaaaaggttttcttaagggtagtgttgaaagacttgccaaatagaatagaaatcgtatcaaaacatattaaccagaaaaataaggctcagcagcagactaaggaaaataaacgcagtaaatattatagatgaagcatagataccttatattatcaataaaaatatcctaaaggaactaatatataagtatttcagtagacatgataggaagtgtaactttgtttccaaaaagtgtaaattaaaacattaggaagagaaagaaagagaaacgttaatatctaattcaggttcaagtacagtaaaaccagttctaatatattgctggagtccttacagattagcatatagcccttttgttgagaatttggaaatatgtccaaaatccataaaaatactgatttmttttgactaagaatttccagtgtaggaaaaattatatatatatatatccctttatcacacttactagattcacaaaaagaggccactggcaagtctgtccacaggaagaagagtgtgacctgggaggctgaggcaagaggattgcttaagcacaggagttcaagaccagcctcggcaacatagaccctcattcccctcaccccccaaaatagcaaacaaaaatgtgtcgttgagtgcattcagtagagtatattatgtgtagtggctcatacctgtagtcccagcactttgggaggctgaggccagtagattgtttgaggccagaagtgcagcctaggaaacacaccaagaccctgattcaacaaaaaatagaaaaaaaaattcactgggcatggtggtgtgtgcctgtagtcccagctactggggggccaaggcaggaggattgcttgagtctgggagtttgagactgtagtaagctgtgatcatgcactgcactccaccctcggtgacagagcaagaccctgtctctagaaaagaatatatggccattaaaagttatgattataaaaactgcattgctacatagaaaaatggttctagtatgatgttaagtgcaactataacggctaccatttatcaagtacctagtgggtgccagtcaatagctgggactctttaacaactctaaaatggagttgccagcagatgttaaaaccaagacacaaattatgtactttcttaagatcactggactggaaagtaggtaagctagaatttgaatgttggtttttctggccccagacatatagtgccagaaagaggtgtccatgatgcttaaactatgtaaaaggggtaacagaggacatgaaaaaagatgaggagaaaacactcaagcatggtcatagttactaggttaaggtggtaggattatagatgtgttgttttggtcctttctatttttccaaatttattacaactattacactttaggagaaaagtactagaacctttagcatagcagtcttaaattccacgactctacaaatgcaagctattttattggtgttgaaaggtagttggggccgggcacggtggctcaggcctgtratctctcagcaccttgggaggcagaggtgagtggatcgcttgagttccagaccagcctgggaaacatagcaaaaccccatctttacaaaaaatgccaaaaataaaagccggatatggtgaaatgcgcctgaggctgaggcagggaggatcacgtaagccctccccagcctgagcctgggaggttggggctgcagtgagctgcccctcatagctgccactgtactccagtagtctgggtgacagagtgaaaccctgtctcaaaatctcaaaaaaraaaaaaaaaaagaaaggtagttggtactacagtacctgcaatagggagttgacatgataggaaaaagcacctattcactaaacttttattctttctcatatctcctcagtttaaaaatatttactgaaacaatagtaatttttaaaatacgtgtttgcacaaaatatggaagcaaggaaaaagctgtccctaatcctgtcaccctaagagaggaagtgttttgttttcttttttaaataaataaatgaawatatatatatatatagtttgtttgtttgtttaattagagatggggttttgccatgttgcccaggctggtcttgaactcctgagctcatgtgatctgctcactttggcttcacagaggcctaggattacaggcgtgagctgccacacctgaccagaggtgttttcataatctgtaaaattatttccagaagtatttttgtcactttacacttcacctgtggatgaatatctgagttttaccacagcctcatctgcattggtattgtcaacagaaatacttaaatagtaactcttccttaattcctaagggaaacaaagttgaatgcagagtttgagaaaaggaaacagcattggaaacctaggcatgatagagcattcctgtagtcctagctagttgggaggctaaggcaggagggtcacttgagcccaggaattcagtccagtctgggcaacatagtgagaccccatctttgggaaaaaaagagagtaggccttttcctagacctacattacagacctagagcactgtataaatttgtttaagggatgaatataaaagtttaaactggtctggcacggtagttcacgcctgtaatcccagcacttttggaggctgaggcgggtggatcacctgaggtcaggagttcgagaccagcctgaccaacatggtgaaaccccatctctactaaaaatacaaaaattagctgggcatggtggtgggcrcctgtaatcccagctactcgggaggctgaggcacaaaaattggttgaacccgggaggtggaggttgcagtgagctaagatcgcgccactacactccagcctgagtgataaagtgagattccatctccaaaaagtaaaataaaaagtttaaactatgttctttagcattgatgggtaaaatttgttttcttttttctttctttcttttcttcatagtgaaggggtctcatgatgttgcccaggctggtctcgaatgcctgggctcaagctatccttcacaccttggcctcctaaagtgctaagattatggacatgagccaccacacctggccaaaatctattttagagagtgtcttgtgcctttataacagaaagaggcactctgggcggagattaccmctgtttataaacttggatttgactgaaaaggattgagtcctagtttgccggtgtctcacatttggaagttaacagatattttcaaagtctgcattcaaataaaatacatggatcctcattggatcatagttgagaaaatgatataatactttattgaactcttggagccatttgaaaaattgaatgttatgggattgtttcttttcctagttatgataatagtttgtgggcttttttttttttttttttttaagatggagtttcgctcttgtcgcctaggctggagtgtaatggcatgatcccggctcactgcaacctccgtctcccaggttcaggcgattctcctcccttagcctcctgagtagctgggactacaggcacccgccaccacacctggctaatttttgtattattattagaggcggggtttcaccatgttggctgggctggtctcgaactcccaacctcaggtgatctgcccaccctggcctcccaaagtgctgggattaccggcgtgagccaccgcaccatttggttttataagaggatgttcttactcttaggagatgcttgctgattagggtgaagaatcataatgtttgcattctacttcacaagtggtccagcaaacatgcacacatacatagaaacaaagcaaacatgggaaaatactattagttgttgaatacaagaggcagatgtatatgtgttcattgtaatatgtcaactttctgtgtatctacaattttcttaataaaagtttgaggaaaagataaacttctaaacagcatgttacatgtatttttctattctggtttcagtagaattctgggtttcttgagagtactagaatgctctgtatggtaagggtgagaagaaagttcaaacagtaatttatagaatgagaggaataagctttggggatagactaaaaaaaatgttcaacaacagtaactggttgaacagctgttctttctaggccaagaagtctcacagggaaagaaatatcagtttctttttttattaaaaaaatttttttttggctagatgtgtggctcacacctgtaatcccagcactttggaaggctaaggtgggcagattgcttgagctcaggagttcaagaccagcctgggcaacatggtaaaacctcgtctctacaaaaaaatagaaaaaattagccaggcatggtggcatgagcctataatcccagctattcaggtgactgaggtgggaagatgacttgagcccctgaagcagaagttgcagtgagccaagatcacgccactgtactccagcctgggtgagagagccagacgctgtcttagaaaaaaaaaaaaaaagaaagaaaaaagttgtttttgtagagatgggatcttgatatattacccaggctgatctcaaactcctgacctcaagttattctcctgtcctggcctcccaaaatgttgagagtwcaagcatgggccaccacacccagccagaagtgccagttaataattttttttttcttcttcaaaccagcacaacagatttgttttggactgtaaagacaaagagcctgatgtactgttcgtgggagactccatggtgcagttaatgcagcaatatgaggtaaaggtggaagggatgagcgtggttcttggctactcatgtatatccattcattactaacagactttcattctgagctgaacttacttatttgtgactcttagagaagccctaattgaggttataagagaatcaaagctacctaaagggattttcttttctttcttttaacttggccatgttctgatctgaagcattgtttataatgaaacttcctcttctactctggtttccaagaggcttgatgttatatttgtttatatttgctctactcagattgtcaagttattatttgtatcttagtatttcctatttgtatttgctaataacatttatcctagtcatgattcttacttatattttgccattttcctatttcatatatttttgtagtaagctattgccaatcttcttttagggtttaggcattcttccatgggaaatttattagtttttttattttttaatttatttttttgagacagtcccgctccatcgtcgaggctggagtgcagtggcacaatctcaggctcaagagattctcatacctcagcccctgagtagttgggattataggcatgtgccaccatgcctgactgatttttgtatttttagtggagacggggtttcactatgttggccaggctggtctcgaactcttggcctcaaatgatccacgtgccttggcctcacagagtgctgggattataggcatgggccactgtgcccagccccaagggaaatttaaaagatagcttttttttttttttttaagctctagcactctaaatttcttcatctcttgtttctacttcaccctgtttctgtagttcaataagtggaaaggagggtttgttgagttgacagcttaattattaatgttgataccttttagggggcatcagattgagttgtgactcatttcttgagctgagacctaaggctgcattaagaactgagttacacaatggtatcttaaaagcccttaaacagtgtcacaccattacagtgttatctttgaatacagaaaaaggaaattaatgccttgcaacacattgcagtcgaaagattaaactttcccctagttttaggtacactaaatcaagtttttctttttttagatatggcgagagcttttttccccacttcatgcactgaattttggaattgggggagatacaacaagacatgttttgtggagactaaagaatggagaactggagaatattaagcctaaggtgaaatgaaagttacttgtcaatgtcattaatcttaagtctgttttggatagttaaattgtctgaaactgtaaaaaaaaattgcttctttaaagacctatttcactatttttttcgtgcctctttaaggtaaatgatactgtcatttcttgagaatatgccaaaatatataattaagaaactagtgaattgtttgcctattgggttgtatttatagttgttataattactttcttaagttgaaggaagagtttttttttttttttgagatggagtcttgctttgtcacccaggctagagtgcagtggtgtgatctcagctcactgcaacctccgcctcctgggttcaagcgattctcctgcctcagcctcccgagtagctgggattacaggcgccgccactgtgcccagctaatttttgtatttttggtagagatggggtttcaccatcttggccaggctggtcttgaactcatgaccttgtgatccacccgcttcggcctcccaaaagtgctggagaattacaagcatgagccaccgcgcctggctgaaggaagagatttgatgctaacgaggtatgctattctgtggaatgcatagatctcgggcagtatgagggaaaactgctcagaggtgggccatgggagcagggccatgattaactttaggaagtaattttggatctgtttaaccatataaacaggtcagtaatcgaggcctgcaagttcatctgaagaaaattagaagcagatgtgaacaaatgaacatttctacccagtatcttatatcataaatactctgagttggcacactgtatataattgtttcagctcccaaaaaagaacaaaaactgagccctgacaaaacgtgctttcattgaaagttgtttgttttaagacaggttctctctgttgcccaaactagaatgcagtggcatgattatagctcactgtaacctcaaactgttggactcggatgatcctatggcctcagcctcccaaatagctaggactgcaggcatgtgccaccatgcttagctaatttttaaatttctttttgtagacagggtcttggtcttgttatgttgcctaggctggtgtcaaactcctggcctcagatgatgatcctcccgccccggcctcctaaaatactgggattataggcttgagctaccatgcgagactgtgattttttttttttttctctaaagagaaaaacttgatggatcagcgtggtgggttatgcctgtaatcctagcactttgggaggctgaggcacgcagatcacttgaggctaggagttcacgaccaccctggccagcatggtgaaaccctgtctctagatttaaaaaaaaaaaaaaaaagccaggcatggtgtcacacaccttaggaagctgaggcaggagaatcacttgaacccatgagatggaggttgcagtgagccaggatcacaccactgcactccagcctgggtgacagaggaagactccgtttcaaaaataaataaatagaaaaatttgttaaagttgcatccagcctccacctctgtgactcttttccttgagtgtacctgtgtatttataccgtgacaggttcttgctgtgtcacccaggctggagtgcagtggcatgatcatggcttacttgcagtcttgaactcctgggctgaatcaatcttcccacctcagtgtcccaaagcattgagattatagatgtgacccactgtgcctggccaggttttatttttatacagtttattaatcttttttgtataatttttggattttgagaaatcagcttcctgctgcatgatgatataattctctcttgtttcctcctagtacaattttaccacttaaatattattccccttggaatttatcctgatatatgataggaggcataaatcgatgcattaagatttctgccctggctgagtgtggtggctcaacatttgtagtcccagcattttgggaggccaaagaaagatggattgagcccaggagtttaagaccagcctgggcaatatagcatgaccctctatctcttaaaagaaaatttaataggatagctgcccagttgaagttagccaacaccatttgaaaagtttatctttccttctttgctttttgaaataagattttcggccgggcgtggtggctcacacctgtaatcccagcactttgggatgccaaggtgggtggattacctgaggtcaggagtttgagaccagcctgggcaacgtggtgaaaccctggtctctactaaaaatacaaaaattagctgggcgtggcggcacatgcctgtagtcccagctactcgggaggctgaggcaggagaatcacttgaacctgggaggcggaggttgcagtgagccgaaatggtgccactgcactccagtctgggtgatagagcgagaccccatctcaaaaaaaaaaaagattttcatctaaatgttggacgttcctttgttcctgggtatttatcttctccttccccccttttttcttcaattgcaggtcattgttgtctgggtaggaacaaataaccacgaaaatacagcagaagaagtagcaggtgggatcgaggccattgtacaacttatcaacacaaggcagccacaggccaaaatcattgtattggtatgtagtctttggtgggtagagagtttgttatctttaggtcagctgaggaatctttttagaaatgtgattgcycatgaatattagagaaccttgaggtggaagcagtttatcatacttccgttgacctcttctttaatgtattttactgtcttactggtttcatcattccccataccagctgtggggccatcttttatccacgcatccttgtttagaagtatggaagccgtggccaggcgctgtggctcacgcctgtaatcccagcactttgggaggccaaggtgggcggatcacgaggtcaggagatcaagtccatcctggctaacacggtgaaaccctgtctctaataaaaatacaaaaaattagccgggtgtggtggcaggcgcctgtagtcccagctactcgggaggccgaggcaggagaatggcgtgaacttgggaggcagagcttacagtgagcagagattgtgccactgcactccagcctgggtgacagagcgagactccgtctcaaaaaaaaaaaaagtatggaagccgtttggtgcctcagtactcctttttttggcctccataattttttgcacaatggcacatgagatttgtctgaatcctgagtctttttattagacctatatttggattactttgtaagtgtcctgttttactgctaatatgttaaaggtggtatattagacattctaatcttctctgaaacataaaaaatttcatcagcaagaaaatggatactttatagttgtaccctgaacagaaaggtgctacccttttgtagaattaaagcattaactcttcatggtctcaaaggtgaacagctgtctgtttcagtataaaagtctagctgtagnnnnnnnnnnnnnnnnnnnnnnnnnnnnnnnnnnnnnnnnnnnnnnnnnnnnnnnnnnnnnnnnnnnnnnnnnnnnnnnnnnnnnnnnnnnnnnnnnnnnnnnnnnnnnnnnnnnnnnnnnnnnnnnnnnnnnnnnnnnnnnnnnnnnncagtggcatgatctcggctcactgcaagctcggcctcccaggttcacaccattctcctgcctcagcctcccgagtagctgggactacaggcgcccgccaccacacccggctaattttttgtatttttagtagagatggggtttcaccgtgttagccatggtctcgatctcctgacctcgtgatctgcctgccttggcctcccaaagtgctgcgattacagacgtgagccatcacgcctggctgaagcagagaatttcttaaacctgggaggtggaggttgcagtgagccgagatcgtgccactgcactccagcctgggcaacagagcaaaactcggtctcaaaaaaaaaaaaaaaatgtctagctgtagatattcttagtcagtttgaaacatgttttagcaaaatctgatacaaatttagttctttagtgagatggtgttaggaagatagtcatttactcaaaaaacctgaggatcactgtgtacaaggcactatcctagttcttgagcatacaaaaatgagtaagacatagtttcggtctcaaggagctcacagtctagtgtatggagacagcaacacagaattattatactgtgtgctgtttagagtaaggtgaaaacgtgtttaacaaaagttgacatctgcattcaaagacttcattggtttccagacaaatagggaaagaaggaaggtattatagaaaaataaagagaattgagcaaaggcttgtacatgtatgtgtttgttgggtgagcagaggaggctgcataaagtttgagcctgggatggttaggagaaggaggccacaaccaggtcatgtaggattttttttttttttttttaatttgagatggagtctcgctctactgcccaggctggagtgcagtggcgtgatcttagctcactgcaacctccgcctcccgggttcaagtgattcttctgcctcaaatcccaagtagctggaactacaggtgcatgccaccatgcccggctaatttttgtttgtttttagtagaaacggggtttcaccatattggccaggctggtctcgaactcctgacctcgttcgtgatctgccygcctcatcctcccaaagtgctgggattacaggcgtgagccactgcgccagaccaggtcatgtaggaattcatatgctgttgggatgtttggattttatccacagttgctggggggccagatcttttttattacaaggcatttcatttacttgttgaggtacttatttatacctgccttattccagaaaggattgtgttaagagtccacctgttaagtacagtgactagtacatagtatttgcttaggaaatatttgttgyatgaatgttgctcaataagccttccatattctttgtttttaaattggatatacaaaagtgttaattatggtgttgtccataatactaaaactttggaaataacctaaatagtagtatcatggaaatgattgtataagtcattgaatatgatagcagtaatcacattacaattatgagggctgtgtgcaaacagactttatggtgtatttaagtgaaaatgtttttgaattgctttgctgggcatggtagctcatgcctaatcctagtatctatgcaattggaaaagggctacaaggagacaaaattaaaacagttattccagggttattccagggtgaatagctctgattcatcaagacagcattcattccacctctttttctcatagtatattatggtgtgggttccatgtggcattaatagatgatgtgtatctatgagcttgattattctgacagccaaatggagaatggattgaagggtagacaacgttggaggtgggaagaccaatcaggaggttttatagtaattaagatgattggagataagttcctgagctatagcagtgtatataatcaggatggagacaagaaaatgacatttaggatgcaaaagttgaataatttaatgataaatagataagatatatgggatgtgagacttgcagatgttggaatgaccagttgataaagaggaagagcatagtttaatgaattgcttttggatcagttgggagtgccttgggaacatttaaatttctttctgtagcttagaagtttcatatgtaattctgaagctctaggaagagatctggctaaagtatttagagtagtgggccagaggacaggtccttgaagaataccaacagttaagggacaggaggaagggaacccatgaaaaaactaagaagaaatggttagctttcattcaaaacagtattttccaatgtttcacaactcaaaggtgtagaaagtgccaaatggagatgttccaggaatatctgaagttataaataataagtagagaaaaataagtgaatcttctaatttaatgttttccactgtgccccagggtttgttacctcgaggtgagaaacccaatcctttgaggcaaaagaacgccaaggtgaaccaactcctcaaggtttcgctgccgaagcttgccaacgtgcagctcctggataccgacgggggttttgtgcactcggacggtgccatctcctgccacgacatgtttgattttctgcatctgacaggagggggctatgcaaagatctgcaaacccctgcatgaactgatcatgcagttgttggaggaaacacctgaggagaaacaaaccaccattgcctgactggctcttatcagtgttaatagcatctcagcttcctcagatcagttctatcactggcactacagaatccttctctttcttaaggcactttgcattgtagaatgttcctggatgttcatatctagtgtttgaaggggaggagggatttaaactggtcctgtacatagaaggtttgtttgacagaggagaaaaattagccaaggaagattgttgtttaaattcatttgaaaccagaaggggactttttagttgtatgtgtaacacattcattgaattattatcactgttttcttgggacaacatcaagcctaaatactgaacaatatgaagattcttttcttggcctttctgtggattatgtcatatataataattatcagaatcattctacttggctttaaaacatgttttctccaatttttttaaggttcataatttagccttttgtttttatgttgcttagattcttatgtatactgaatattttattaacatgtagcatcaggttgaacatgcttgtcattgatatatggaagatgctatagttagaagtgaatttgttctgctttcttaatcttttccatgcttagcagtgaaaaacaggttttgccccagtagagggattctttggagggtattattttttatgctgctgaatatcatgtctataatagacccgtgcatgcagcctttcctccttattccccttcatgcccccctttccccttcattccccccgccaccccggttttttttttttttttttttttttggttcttgttgacattacaagcttttaacacatttttgacctaggagccctgttgctggaagtatagtctccagccagttactctcatgatagtactgctataaaactcattcttgtgtggtgttctgtgctatagattctgtgtattgctgttcatattcggagttctggttttgtttttcccttaaaacctgttaacagttttttttgggggtggggggattcagaactcttgtttcccattccatagcacctgacattatttcaagttttataatatcttaaggtgtatattttattttttttattggcttagttgttttttgttttgttttgtttgagatggagtttcactgttgcccaggctggggtgcaatggtgtgatcttggctcactgcagcctccacctcccgagttcaaatgattctcctgcctcagcttcctgagtagctgggattacaggtgcatgccaccatgcccggctaatttttatatttttattagagacgggatttcgccatgttaaccaggctggtctcgaactcctgacctcaggtgatctgcccgccttggcctcccaaagtgctgggattacaggcatgagccaccatgcctggccttattggcttagtttttaaattatcctccaaaaattttgggcctttttctgtggggaaacaagtgaagctgctcttcagcatagacactacctttatcccatcattttagtaaaaactaggtttgtttcacttctgaggtgtcttattaatgtacttcatctgagaatttgttgatcttaatgttcgagctatataagaactgccattaaaaaaaatgggataatagatgattttatcagtatacctgtggaatatgtacaaactggatctatagatattttgaactggaccaggtgggtattgaagtaacccatcaaaatatgctctgcagtgattccgcttaatgtttaaattcagtaacgtacttgaaaggcaaatttcagtgcttttgttatgttggaggagggcttactgatgcgtgctaagaccgatttctgattgagggatgaaccttgggctcatttttttcttgtgaagtctctttctagaaaattttttggttttgttctttttaaaaaatacatacttttttgaatgtatcatgtcttcattaacaacagaaaatccacatggtgtttactaaacttgtttacgacattaaaaatttcctttttatttttagtagcccaggttgagtttttcacaagagatttttttcttagctgaggtatagttgtatagcaagaagaattaagccagatttttgtgtgtggaaagacagttttctatccacgtctttttctgtttgtcagaaggtgggagtatggtccaaataaatccattaggttactcctgcagcatgcgcttttagcttctctcttgactgaggatcaaatatccctttgtgagctggccctcagctcctttgctcatgtgtacaaacctcagatgttactacattttatatctaccagagctattcaagcaatagtatttgaaccactagccttttaaataaaattctgccccattactgatgtgcagatattgagttcactttcattttttgccagatttctttgcactactttaggtaaaaatagttaatctatttttctttgacatcctagtttgcgtcagtgacagaacttactgcttagtctttgtactttttaaaaaatctataaatttaatgcactgtccaagtgaaatgtcctagttgtcattgtgattaaggggccaactttccaggcagctagcagagatactattctcttcctctcccagcaaatttgtattccttcgcccacgcattcctgctatactagatggcagccagtgatggaactataaagatgtctgtggtcatatgttgaatgtggcagcttgaagatgtactgccacgggtgatctagggcaggctgtcttccagtccatgtgttctcggtcgccgtagacagcgctctggctaccaccgtgaggctacttgaactgtcaggggcatctgcctaaaccagaatcttttgtcagaaaccttaacccaacaaaacaaatcttgagtagctcatgcccggctcttaggaattttgtctgtttaaaaaaaaaaaaaaaaaaaaagtccaacttactttattttatttttttaacctagtcactgtttacaattgtatgctaaagcctgaaatattgtctgtgctgtggtgtatgagcattgccaactttatatttattgcagtgaagaagaaactaaaaatatatggaaatgaggagcatgtccaagctcctaaatccgtgtgggtgcatgtgggagaagtgagttagggcctcttgaaaggaggctttttggagaggggtcccccaggtttcttggtgttcctgcttggggatcactgctgctagctgactggacctccccattggaagtttgtgattttgctttggcaaagtttcattgactagtagaactcattctgttttagtgtatatttcaatataaatgtaaacattttgctcaatttgctggtgtctttctgtctcctttatcatagtttggattctaatgaaaaaaagggatggtttttccctgccttatcataaggaaattggatacttagatgatcctgcttctttactgtggaactgaatgcaccaggctgactcatcacttaccttctcgggcatgtagattggtagggtgggatgagtaggtataaggacccctcagaaagcacaactgccatccttgaagtctactcttttccattagattggaatagttttgcagataggttagtctggattataggctgtggaccacctcatctgaactgggtgaatgtcatcagtcagtataatacagtgttattggccgggctcacgcctgtaatcccagctactcaggaggctgaggtgggagaattgcttgaacccaggaggcggaggttaccgtgagacgagattgcgccattgcactccagcctgggcaacagagtgagactcttgtctcggaaaaaaaaaaaaatacagtgttactacagcatagaggacatgaaccttgagcacggactcatttatcacccttacgtccccagggtaaagcagccgcctccaaatactctatctcagagataatgagactagaacaagggtcggttaactggtcgatcgggacctatcctgatgacacaccagcaactaccaggccagcaatattacagtgagttggtatgccggtatgatgttccttggcagctaaaagtttctgtgatctttgtatcatttgctttatcactgttcacctcagtggtatactgttggattaaaatgatttgctgctttaggaggaaaaatttggaggtaaattgagacattttgtttttctagctgcccttcccccctccccagtatctcatcacaccaagttcctctccacccacactcctggaggcctttgtcagctgcttgcaggccacacagcagcagtgaaagcagcctggatcttgaagctttgctttactgtatgtggattaccccatgtgaacctcttaaatggcccagaacaagtggaagaggtagtaatgtggaagaaagaaaaagctccctcaccagcatctgtacttgaggggaaaactggacaaaccaacatgagaatccgtcccctaatttattttccagccatggcagagatgaaatcttaacccaacgacatgtttttacatagctataaagcaaagatcttcaatgttttgctaaacatataatatttgtggcctgatattatgctatgccttttgcctacttgctggttcattctagctttatatatatatatatatatatatttttttttttacattctggtcaagctttggcagtatgcttatagtggattcataacacatcagtatactgcagcttgcttgtcagccactgagttaaaagatcaagtccaagccattaaatgtaacatctaacagtctccatgacctggcctctttaatttgtaaccttccaccctttactttgaacttttctgccaagagcactgagcttcctttatgtttttgcccatagttgggagccccctatctggaatatgctcttacccctttgctggtctagctcctactctatttttattttttggaaacagtctcgctttgttgcccaggctggagtgcagtggtgcaatcttggtttactgcaatctctgcctcctggattcatgtagttcatgtgcctcagcctactgagtagctggaattacaggcgtgtaccaccacgcctggctagtttttgtgtttttagtagagacagggttcgccatgtttaccaggctggtctcgaattcctggcctcaggcaatcggcccgccttagcctcccaaagttctgggataacaggcatgagccaccgcggacccagccgcctgtcttctgatttctaagccaaagacccaagctttcttgaaataagagagctggctcatttttatcggtgatctttggaggcagagatttgagacggtcaagtatttatctgcttgttttctgcaacctgatgaccagccttgtttcctggaaagctctgatgttggtttcatcacgtggccagagggaaccagatgcagggcctgagtatatcacagatatttcccagtgtgaatggtgaaagcccagttttaggaaatggaaagtgactgacctatctctaggagaaagtactgcccacttggtcagagcttatctcgtttgtctctcttcctgttctttagacagtaggatggtgaatgcagggaagcctagctccactgtgagtacttaggacagtagagaccaagtccagacaaggctcccaaaaggctcagaaagctcaagtggtttgcctaaagcacacaatgcagggatttaactgtagaactttttttttcttttttctttttctttgaatggatgagaggtttttatgttgcccaggttggcctcaaacacgtagcctcgcctccttatgtgccagggcaacaggcctgagccaccgcagctcccagtgactgtagaactttttgacatcaaagtccgtcctttttccgtaataccatgaagccatgtgacaggtttgagaccttccccagtatggcagattaaatcctgtgtctttaactgattcccaatctaacatgcatccagtctttgcagtccttgcaggaagagagataaccagacacaagggcagccctgggaaagaacagaacttgtatgatggaaagaagtgctgaactcttgctggagctgcttatgtctgggacaattctttctaagcaccaaatgaaaaaacagccctttttataatcacagtgaaaacagaaagcttcaggttcatttccttcagaggggttggttttgaatcttttttttctgggttaaagttataccattacatgatactaaaatctgttttgattctgtctcccacccataggcatggctactccctacctcccaggttcctaaataatttgattggattcagctaatccatttactgtgattcttacaaaatcctgctcgagtgcagtcttcatgtcttttgtgtgtgtgtgtgtgtgtgtgtgtgtgtgtgtgtgtgtgtggcagtttcactcttgttgcccaggctggagcacaatggcctgtggtcgcacactgcaacctctgcctcccaggttcaagtgattctcctgcctcagcctcccgagtagctgggattacaggcgcctgccaccacacccagctaatttttgtgtttttatcagagacggggtttcacc

SEQ ID NO: 95861 - DNA, 19421 bp, Homo sapiens
attttaagatatcacttatttcccaccatacagaaaaatcaactcaaaatgaattaaagacttaaatgaaaaacctgaaacattaaaaatcctggaagaaaacatggaagaaagaatccatgacactggtcttagcaaatttttttttggatattaacacaaaaccataggcaacaaaagcaatgatagacaaatagaatacatcaaacaaaaaaaaaaatcttctgcacaaccaagaaagcaatccacagagtgaagagaaatggggactaaatatctgcaaatctatatctgataagggtttaatatccaaaatacataaggcactcaactcaatagcaagaaaacaagtaactggattaaaaaatggacaaaggacctgaatatctatttctcaatctatttctcaaattcccagtctcagatatttctttatagcaatgcaagaacagtctagtgcaataagggtctaattttattctttgcctatggatatccagttttctcaacaccgtgtgttgaaaagcctgtcctttcccctgtgtatgttcttggcatctttgtcaaaaatcaattgaccttaaatgcatggattaatttctgggctctgctttctgttccgttaatctatgtatctgtttttatgccaataccgatctgtgttggttactatagctttgtagtatatttcaaggtcaagtatatttctcaaaagaggatgtatgaatggctgacaggtatgtgaaaaggtgctcaacatcagtaatcatcaaagaaatgcaaattaaaaccacaatgaaatatcactggctgggcatggtggctcacacctgtaatcccagcactttgagaggccgaggcaggcagatcacaaggttaggagttcgagaccagcctggccatcatagtgaaacaccgtctctactaaaaatacaaaaattagccaggcatggtggcgcatgcctgtagtcccagctactcaggaggatgaggcaggagaatcacttgaacccgggaggtggaggttgtggtgagctgagattgcgccactgcactccagcctgggcaacagagtgagactctgtctgaaaaaaaaaaaaaaaaaagaagtatcacctgacactggttagaatggcctctataaaaaagggggaagatgacagtgttgtgagaatgcagacaaaggggattctagtaccctgttgatgggaatgtaaattatcacagccattatggcaaacagaatgaaagtttcttaaaaattaaaaataaaattaccatatgacccacccatgtcatggtgagtctacataaaggaaatgaaatcagtatgctgaagatacctgcactcccatgttgattgcagcattattcacaataatggaatcaacctaagtgtccatcaacagatgaataaagaaaatgtggaatatagacacaaaggctttaattcagccttaaaaaaataaggaaatctattatttgtgacaacatggatgaagctggaaaatggttatgtgaaataagccaggcacggccaggcgcggtggctcacgcctgtaatcccagcactttgggaggccgaggggagtggatcacgaggtcaggagatcgagaccatcctggctaacacggtgaaaccctgtctctactaaaaatacaaaaaaattagccaggcatggtggtgggcgcctatagtcccagctactggggaggctgaggcaggagaatggcataaacccgggaggtggagcttgcagtgagccaagatcgcgccactgcactctagcctgggtaacagtgagactctgtctcaaaaataaataaataaataaataaaaaataagccaggcacaaaaaaagcaaacaccaacacataatctcacttatactgtggaatctaaaaaaatagaacccacagaaacagagagtggaatggtggctaccagcagttgagggcagggaggcagacgtacctggagggttgcggtggggagactgttggtcagcaggtgaaaggatacaaagtttcagttagccagggggaaaaaggccaagagattgatgatgtgacatggaaccgtggttaataaccacggacttgaaaatctctaagagagtagacttgatgtattctaaacacacacaaaaagtgtctgagctaataaacatattatttagcttgattgtggccaaaattatatttcagattttatatacatatttcaaaacatcatgctgcacaggatagatacatgtaattttaattgtcaactaaaagttaatgaaataaaattatttttatttttatttttattattattatactttaagttttagggtacatgtgcacaatgtgcaggttacatatgtatacatgtgccatgttggtgcgctgcacccattaactcgtcatttagcattaggtatatctcctaatactatccctcccccctccccccaccccacaacagtccccagagtgtgatgttgtccttcctgtgtccatgtgttctcattgttcaattcccatctatgagtgagaacatgtggtgtttggttttgtgtcattgagatagtttactgagaatgatgatttccaatttcatccatgtccctacaaaggacatgaactcatcatttttttatggctgcatagtattccatggtgtatatgtgccacattttcttaatccagtctatcattgttggacatttgggttggttccaagtctctgccattgtgaatagtgccacaataaacatacgtgtgcatgtgtctttatagcagcatgatttacagtcctttgggtatatacacagtaatgggatggctgggtcaaatggtatttctagttctagatccctgaggaatcgccacactgacttccacaatggttgaactagtttacagtcccaccaacagtgtaaaagtgttcctatttctccacatcctctccagcacctgttgtttcctgactttttaatgattgccattccaactggtgtgagatggtatctcattgtggttttgatttgcatttctctgatggccagtgatgatgagcaatttttcatgtgtgttttggctgcataaatgtcttcttttgagaagtgtctgttcatatcctttgcccactttttgatggggttgtttgtttttttcttgtaaatttgtttgagttcattgtaaattctggatattagccctttgtcagatagtaggttgcaaaaattttctcccattttgtaggttgcctgttcactctgatggtagtttcttttgctgtgcagaagctctttagtttagttagatcccatttgtcaattttggcttttgttgccattgcttttggtgttttagacatgaagtccttgcccatgcctatgtcctgaatggtgatgcctaggttttcttctagggtttttatggttttaggtctaacgtttaagtctttaatccatcttgaattaatttttgtataaggtgtaaggaagggatccagtttcagctttctacatatggctagccagttttcccagcaccatttattaaatagggaatcctttacccattgtttgtttttctcaggtttgtcaaagatcagatagttgtagatatgcggcattatttctgagggctctgttctgttccattgatctatatctctgttttggtaccagtaccatgctgttttggttactgtagccttgtagtatagtttgaagtcaggtagcgtgatgcctccagctttgttcttttggcttaggattgacttggtgatgcaggctcttttttggttccatatgaactttaaagtagttttttccaattctgtgaagaaagtcattggtagcttgatggggatggcattgaatctataaattaccttgggcagtatggccattttcacgatattgattcttcctacccatgagcatggaatgttcttccatttgtttgtatcctcttttatttcattgagcagtggtttgtagttctccttaaagagatccttcgcatcccttgtaagttggattcctaagtattttattctctttgaagcaattgtgaatgggagttcactcatgatttggctctctgtttgtctgttaagtgtgtataagaatgcttgtgatttttgtacgttgattttgtatcctgagactttgctgaagttgcttatcagcttaaggagattttgggctgagacaatggggttttctagatatacaatcatgtcgtctgcaaacagagacaatttgacttcctcttttcctaattgaataccctttatttccttctcctgcctaattgccctggccagaacttccaacactatgttgaataggagtggtgagagagggcattcctgtcttgtaccagttttcaaagggaatgcttccagtttttgaccattcagtatgatattggctgtgggtttgccatagatagctcttattattttgagatacgtcccatcaatacctaatttattgagagtttttagcatgaaggttgttgaattttgtcaaaggccttttctgcatctattgagataatcatgtggtttttgtctttggttctgtttatatgctggattacatttattgatttgcatatattgaaccagccttgcatcccagggatgaagcccacttgatcatggtggataagctttttgatgtgctgctggattcggtttgccagtattttattgaggatttttgcatcaatgttcatcaaggatattggtctaaaattctcttttttggttgtgtctctgcccggctttggtatcaggatgatgctggcctcataaaatgagttagggaggattccctctctttctattgattggaatagtttcagaaggaatggtaccagttcctccttgtacgtctggtataattcggctgtgaatccatctggtcatggactctttttggttggtaatctattgattattgccacaatttcagatcctgttattggtctattcagagattcaacttcttactggtttagtcttgggagagtgtatgtgtcgaggaatttatccatttcttctagattttctagtttatttgcgtagaggtgtttgtagtattctctgatggtagtttgtatttctgtgggatcggtggtgatatcccctttatcattttttattgcatctatttgattcttctctctttttttctttattagtcttgctagcggtctatcaattttgttgatcctttcaaaaaaccagctcctggattcattaattttttgaagggttttttgtgtctctatttccttcagttctgcactgattttagttatttcttgccttctgctagttttgaatgtgtttgctcttgcttttctagttcttttaattgtgatgttagggtgtcagttttggatctttcctgctttctcttgtgggcatttagtgctataaatttccctctacacactgctttgaatgtgttccagagattctggtatgctgtgtctttgttctcgttggtttcaagaacatctttatttctgccttcattttgttacgtacccagtagtcattcaggagcaggttgctcagtttccatgtaattgagcggttttgagtgagtttcttaatcctgagttctagtttgattgcactaaaatttttaaaaagtaaaaaaaatacatgtggtttaatacaattcatgccaactcattccctcgttttttgctataaaccttgcaaggagatgaataatccaaggctcttggataagataagggccccatccatcttgctcctctcagccctggaggaggagggagagtccttttcccctgtctacgctcatgcacccccaatgagtccctgcctccagccctgacctctgccctcggtctctcaggcagatccagggccagttctcccatgacgtgatccctctcgaaggcaaggcaccaggcaagataaaaggattgcagctgaacagggtggagggagcattgraatggcactcagggcaaaggcagaggtgtrcatggcagtgccctggctgtccctgyaaagggcacaggcactgggcacgagagccgcccgggtccccaggacagtgctgccstttgaagccatgycccrgcgtccaggcaacaggtggctgaggctgctgcagatctggagggagcagggttatgagsacctgcacctggaagtacaccagaccttccaggaactrgggcccattttcaggtaaagccctcchtggcccwcgctgggaacacccagagccctgcccttgctgcccaggaccctgccgggcactcagcactgccattcccagcaggtcccggcactctgcatcctttggaagatggggaaggagtgcagcacgtgctggtctgtggcgctgccagggcaggggatggtgcagagcaaatcccagctcgctgcagagagggcaggactcagaggcactgaagttaagaggttccgggcagtcagcaagagggctttagctgtgaagccgctaatccaggagaggggagggtggacaggagacactttggattgggactgcagggtggggctagcggggacatggtcccatccagcacggcctcgtgcttggccccacaggtaygayttgggaggagcaggcatggtgtgtgtgatgctgccggaggaygtggagaagctgcaacaggtggacagcctgcatccccacaggatgagcctggagccctrggtggcctacagacaacatcgtgggcacaaatgtggcgtgttcttgytgtragcggcgagctgagagctgggagcagggtgggcagcctgggtgtaggggggaggcgagagaggcaggacccaaaagcacatctgccctgggcccctgtggtgggcagtgagggtgagcacccgacccagaggacggccattccgtggggtcgtgtctgccctgtgggttggggaagcagggcggtggtggagaaatgggcacgggcacctctgcagagaagatgcagagcaatgagcccttctgtgtagtgagaacccgctctgcaccaaccttggccgatgctttctcttgcggtctggggactgtccttcccataggtcagaaaactgaggccctgagaagggtactcccactggcccaggtcacaggctgagtactgagcctggtgttcgccggggccgcagcctccctcagggcgctcagggtccctgcagtcctggcaaaccttcctgatggggacagtccggggcaggaggcaggtggggatgcaggtggctggtggctccattgttctcagaagcaaggcacgaggtggggcggttgatggcactggggaggatgtttcctggcccrtgcagagggtggcgcctggtcaggtgggcagggagaggctgatgcttggagtcagtcacctgcaggaatgttgtcattaggacgggggaaggactggacgaggatgtcacagtggcgacagcccccactccatggcaggaggagaacgcttttgggaatagtggggtttaggtaaaagggcacycaagggtgggggccttcactgaggctggcctacagacgacatctgggagggagtcaggacccaggaaggcaagtccagaaggctgggtgcacataacggaaggaaggggagcgcacctgtatgtgtgtgygtcttgcatctgtgcacatgctgtgtgtttctctgtacctgcatttgcacgtgttgtgtgtgcatgcgtgtgtgcacatgtgtctgtgtgcatgtatgtgtggtgtgtgtgcacgagtgtctctgtgtgtgcatgtgcaggtgccggcatgggtgtagtgtctgtgcacatgtgtacatgtgtctcttcacacatggtgttgaggtcttgcatgggcgcatgtgagcatgtgcatcttctgcctgccatcactgtcaacagctcacarcagccagctggacataaataaagctttgagttttgcagraatgtggctgacaggggaaattcctccccaycattccctgggggcatccatggagcccccamgcactctggctgtaggtgaggatggcatgaagcacaaagcttggtttctgtcctgcagaagatgcagacacttcactggggctgctgccccagaggcactgtgcccagggcagggaagggcggggaggagagggcagccaggggctctcccctcaggacactgtgtgggtgaggtgggcaaagcttgacaacaggggtcagttcctttcttgcagaaaatccctcccccctactacagggagggcctgcatgggtgaggtggtgccagacttggggygccaggtcccgggaatgacctcagttaccctgtcagcacctgtgggcagaagctaccatctcatccctgcttagacctgagtggcctttgtccagcacctggaggccgctctgagaaaaggctgcagctcgaacacaaacaggcagcttctaccagggcccccagtcagctccctgcaggccgattccccttggggacaaggaggatgggatacgggtcagggcctgtgtcttgctggggcggcctcacaagctctgccctggcctctgtaggaatgggcctgaatggcgcttcaaccgattgcggctgaatccagaagtgctgtcgcccaacgctgtgcagaggttcctcccgatsgtggatgcagtggccagggacttctcccaggccctgargaagaaggtgctgcagaacgcccgggggagcctgaccctggacgtccagcccagcatcttccactacaccatagaaggtgtgggccasrtgggaagatccagcctcagagaccctgsagtggccagggacggggatgggggactgaagggagtgtggggaggcagccaggaggyccgrggctgccttgtgctcagcartgcatcctccccgcagccagcaacttggctctttttggagagcggctgggcctggttggccacagccccagttctgccagcctgaacttcctccatgccctggaggtcatgttcaaatccaccgtccagctcatgttcatgcccaggagcctgtctcgctrgaycagccccaaggtgtggaaggagcactttgaggcctgggactgcatcttccagtacsgtgaggccagggacccgggcagtgctatggggaagggacaccatgggggcccartttctccctctccaccacccagtggggaatggaggccacagggaggggtcggggattcctcaccktcctgccagggagattggtgygaggctggggctgggctgggctgatccggagaatttgggatgagagcagggagacttgggtgtcggggcagkctgggcaggaggaggacactgaaggatgtytcccagcacyaaagtctgagggctgcctccygctccccggatagrcgacaactgtatccagaaaatctaycaggaactggccttcarccgccctcaacagtacaccagcatcgtggcrgagstcctgttgaatgcggaactgtcgccagatgccatcaaggccaactctatggaactcactgcagggagcgtggacacggtcaggccrgcaaccagccccacccagagagggtgatgccaagcctgcctcccaggcactgcctgccaatgtcacacggcgcccacgtgtcccatccccaggctatgggccccacatttcttacttgggattgtgatgtgataaacacgtttgcaggttgccatggttggaatggggggttcctttctgtggaggactcagggaaaggggtttggatgggcattaggatttgaagtcttgggctctgtcgtkctcagggtatgcatgtctgcacccctcacagggaggttgtcctgggagkggtgtcccgggggctgagtcctcctgtgcaaggtctgaccctgcagctgtgtctcctgcagacggtgtttcccttgctgatgacgctctttgagctggctcggaaccccaacgtgcagyaggccctgmgccaggagagcctggccgccrcagccagcatcagtgaacatcccyagaaggcaaccaccgagctgsccttgctgcgtgcggccctcaaggrgaccttgcrgtgggtgctggctgaggcctccctgtggccctggccccctgctggagarcagcccccactgggtggtggcagacagaatctggggctgataaacagcgtcacccagcagcccattcccctgcacctgctcttcctccccctcaaggacagggagctcttcttyctctggaatccctcttcaacgccctggggattaacgtggrgcatgtccttctgcgctyggggctgcttaagttaggggaggtttggcygggctcagcaggtgcaaggaagcacttcctacgacctgggcttcccatggatctgggacctctgcgggktcttsggtaggaagggtgcagagagcacaggragccccatccagctgaggaccctttctatggatgcccccacctccaggctctaccctgtgggtctgtttytggagcgagtggygagctcagacttggtgcttcagaactaccacatcccagctggggtgagtgagccccacacccctcgagctgagaacctccctccccagtcattccctgatccccgctctgcaccgtccgcagacattggtgcrsgtkttcctctactckctgggtcgcaacsccgccttgttcccgaggcctgagcgctakaacccccagcrctggctagacatcaggggctccggcaggaacttcyaccacgkgccctttggctttggcatgyrccagtgcctygggcggcgcctggcagaggcagagatgctgctgctgctgcaccatgtgagcaggcccgggctggggaggggcctgggcggggtctgggcagcatgggcggggcttgagcaatgtgggactggcctcggcagagtgggagtggcctgcatgtttcctggactgggcagagcsggtactgggagaacctgggccaggttgaggctgtgtaggtcctgggcaggagttggtatggtgaggagcgtaccatctgggtgaggttgctgctaaaccgggtcaggtgggaactggggaagtcgggtggagcctgtacaggatagtggggcttgggcaatacctgggctggatgaattctgggcctgggctgtaaggtggggctggtcaggaatgaaacaggttggaggccaggctgctgttcccccttcagcataatctctgcaactttgagggtctgagaaggctgcaccacgtgcatgggctgcggaccaagccagatggaaacccsgcttctgtcctaggtgctgaaacacctccaggtggagacactaacycaagaggacataaagatggtctacagcttcatattgaggcccagcatgttccccctcctcaccttcagagccatcaactaatcacgtctctgcacccagggtcccagcctggccaccagcctccctttctgcctgaccccaggccacccctcttctctcccacatgcacagcttcctgagtcacccctctgtctaaccagccccagcacaaayggaactcccgagggcctctaggaccagggtttgccaggctaagcagcaatgccagggcacagctggggaagatctkgctgaccttgtccccagccccacctggccctttctccagcaagcactgtcctctgggcagtttgcccccatccctcccagtgctggctccaggctcctcgtgtggccatrcaagggtgctgtggttttgtcccttgccttcctgcctagtctcacatgtccctgttcctcttcccctggccagggcccctgcgcagactgtcagagtcattaagcgggatcccagcatctcagagtccagtcmagttccctcctgcagcctgmcccctaggcagctcgagcatgccctgagctctctgaaagttgtcrccctggaatasgrtcctgcagggtagamtaaaaaggcccctgtggtcacttrtcctgacatccccattttcaagtgatacaactgagtctcgagggrcgtgtgttccccagctgatcrtgtcagcctcrtgccccaggcctcrtctttcatggaccaggycttgttccagsagtgrgygttgggtcctctgcttcctgwgctgtcccctggrgaaggtcccraggatgctgtcaggagatggaagagtcatgtggggtgggaacctggggtgtggttccagaaatgtttttggcaacaggagagacaggattgggccaacaaggactcagacgagttttattgactcatttctctggttgatacggagccatgtcatgtgccacgacctggggtgggcacagggaggctgcagttycctrcgtgaacctgccttgggcctcatctgctcctagcccagcagagagagttgacccctcctgaactggccactccccagtgctccygtgcagggakaggaagcacccagtttgagagtgtacccagccagactgtctttatctccatggattttcatcagggcaaagatcacagcagccagctcctggtggctgatgaggatcagagcatttgttcccccatgaaaggggaaatccctatggcatcattccagtggtggtcagtagatccaggacgccctgcaggactcagcctgtacagggagatgaagtgccccaggttgggagcacacctagctagagttatttgtgttaatctattcaggatgctctaagaaaacgccatagactgggttgctgacaaacatcagaattctatttctcatggttctgaaggcttagaaggctaagatcaaggtgtcagcaggttctgtgtctggtgaggacccacctcttgtttcatagataaaaccttcttgctgtgtcctcacatggtggaaaagggcaagacagctcacagagacctyttttataaggacgccagttccattcaagagggcactgcctgcattcccttcccccctcaaaggccckgccctgctattatcgtcaccttggtgactagatttcagcctatgaattctggaggcggacacaaaaattcagattaaactactctgcttctgtttctctaaaatctacatccttctcatatacaaaatacatgcatttctccccagtagccccaaatatcaactcattttagcatcaactttaaaattgtagtccaaagtgtgatttaaatgttatctgagtcaaacatgggtaagactcaaggtacaatttatcctgagtccaactgttcttgctgcgaacctakgaaatcaaacatgttatgtgcttccaaaatacagtggttggagaggcataggataaacattcccattccagaaaggagaaacaggaaagaagaaaggagtaacaagtttcaagcaactccaaaattgaatgtgacaaacagtattaaaccttaagcctcaagaataatctcctttgactggattttccatcttctgaacatagtggtgcagggattgtttccctcagggcttcaggatgctctgcccctgcagcttggctgggtgcagctgcagtgcagctctcatgagttggagttgcattcctgcaggtctcccagactggaatgactcaccggtagcttcacctacctgggatcctgggctgtcctgctctgctgcctccactaggcatggctttcacagcagccctctgcctcagtcttgtgcctgaagttgtgggccactccaccctttgatatccaggtgcaggcttccacaccccacagctcatgcaaccttcactccagcagagatgaccctatgttgacaccaccaaggtttactacatgtgccctctggaggggcagccactgtggcacatgacccacataagcttactggagcccacttggggtggtcaatgaacagaactccagaatgtggggagcagagccttgaggtagcacaagggagtgagtgccaaggtcttacagaaaaatatagcccatcctttaaaaatattctgtccccctagactcttgcactttgggtgtgtggtgacagtggcagccccagttatttctaaaatgcctccagggtcattcttccattgtcttggtgaacaacacctggctgatccatactaatcttatcaaatggtcccttggccacacccttggtgctgtctccagaacatgctttctcatattttgcaatatggacagactggcaatttcccaaatctttaagttctgcttcccttttgatttaaaaaaaaatccatcttcaaattatttttctcttcttctattttactataaacattcaagagcaccaagttgcaccttaaacacttggcttagaaatctcttcagccaaatatcttatttaattactcaccagttctactctacataaaacactaggacataaagtcaattcagccaagttctttgccagtttataacaaggactacctttcccccagtttccaaataacatgttccttatttctgtttgaagtcccataagaatggtttttatcatctatatttctagtaccattctgtccatggccacttagatattctctaagaagatggaggctttctttacagccctcctcctcttgttctgagcccttaccagcagcatccttcagggcctgctcatggtgacataggctttctctagcatgcacttcaaaacccttctagcctctacccaattacccagcagcaccccatctttcagtaccaatcttctgtcttagtttattcaagctgctataacaaagcaccacagactgggtggctcggaaacaacagagatttgttgctcacagatctggagcctgagacatctgagatcaaggtgctggcagatttggtgtctggggagggtctatttcctgagtcatagataggacattcttactgtgtcctcacatgatggaaagaaatgaagaagctctctggggactcttttgtgtgggcactttcactttcaacagcatttttcagctttacttgcacttatcctgaaaaatttcctgtacatgtatccagcagtggaatttaaaaaaacaaacaagcaaggattggcaatagggtttggaggagccaggacccagatatccaagatagcaggcagggtcttttttggaaaagagcacagtctagccctgctcacatgtctcagcccttttactgatagagagggactgttgggctctcttcttccttaagagttgtccttggaaatgtccacctctggctggaaaataattccccagctccagccttctcactctcctaggtgaaggtgtgtgagtgttgtgtggagaagggcacaagcctgaggcagcacaggggaaggtgtccttgaggatggcagaaactctgctttgcctgaagaacctgtaatggcctccctgagggagctgccttgcaagacactgttgatttgtctcagaacctactgcaccatctctctttccttctagacctagagctacacttaagtaccagcaggccccaaaagatgaggtaaaagtgtgacccaggaggagctgtgctacactctaaaacaaccatgtgccattcccaatacatgcagatgcatcaggggaaaacaagtggaaatgaattttaagtgggtgggatcatggttgaacaaaagaaaagttagattcaggctgaatttattgatatgggccctccaagcagagattctggatagtttgagagttagaaatgggctctaatagtctggttggttggctgaaatatgaacaaaatatggccgacatgaaatgaatgccaggacaatcttagttcaccatagaggaacatatccaaagcctgaaggagagtgaaatgataaagcagattgatcatgtaagatctgtgccaatccacggaggccacccatccccggaggcccaaggaagtatctttcaccatgactgtcagaaatcaatttgggaagggagtttttttatccttgaagagctctgtgggcactcttctctgcaggtcaggcatcatagtgggagctgctggcacttaactgggatccttaaaggcagcggaaataattgcagtgggaggggcgtagccgggccttgtggcaatccttaataaccagaaaagctgacatggctgcaataataaacagcacggttaaagccgtactcagaagaatctgcctggcggaggcccatggcattggctagttgatcacggtgttcctagatgccaaataaataggtatggagtccactaaatccttatttgatctgtataagcagaggagttctaggtcaagtggacggaagttaaaccagaatcataaaagcagagtcatggcccctgaatcagttcccacaatgagccagtttacatgcccagaaccgcttgaatgaagggtaggccagttcctcttgaggagcagaccccatgacactgccaaaaatttatactgttaatctttctcacatcctcccccaaagagccttttaccagggtgactttgcactgggaaaaaggaaatcgtcatacttctcagggatttctaaacacaggctctgaattgacactaatttcaggagaccccaaatataagggattatagaactcagatgattaatggaattttagctcaggtccatctcacagtggatccaatgggccccaaaacccatccagtgcttatttccctcagttcagaatgcactactggaatagacatactcaggtcctgacaaaatcccacaagggtctcttgacctgtgaagcaagggctattactgtaggagaagccaaacggaagccactagaattgcttctgcccaggaaaaccataaataaaaagcaatattgcacttgcagaaaaaattacaaatgttggtgtcactatcaaggacttgaagagtggagggatgatgattcccgccatactcccattcaactagattatttggactgagcagaagatagatggatcttctagaatgacaataaagtactgtaaatttagccagatggtgactccaagtgcagtttctgtacccgatatcatttcattattgtggcaaattaatatgcctcctggtacctggttgctatgatttcaatgtcccctccagaactcatgttgaaacataacccagaagtggcagtgttgattcgtggtgcctttgggaggtgactagactatgaagggttttgcccccattaatatattaatccattcctggattaatgggctgtcatggaaactggtgactttataagaagaggaagagagacctgagctagcacacgcaatcacactcagcccctcgccatgtgatgtcctgcgccaccctgggacccttcagagagtctccaccagcaataagactctcaccagattcacctcgaactgacagcttcttagaccccataactgtgaaaaataaatttctttttctttacaaattacccagtttcaggtattctgttataaacaacagaaaacagactaagacaatagtatgcaggtattgactgacaaatgcttttttctaaatttctattaggaatgaccaccagaagtaatttgctttcagctggcaaaatcagcaatacaacttttctgtcctaatggctgtgataattgtatacgttaacttgagtaggatacagtatccagtaactcaaacatgatttatgagtatacgtctgttcttaccttcctataaagaaatacctgagacagtgtaatttattttaaaaagaggtttaattgcctcatggctctgcaggctgtacagaaaggatagaagcttctgctcagcttctggaggggcctcaggaaacttacaatcatggcgaaaggtaaagaggaagcaggcacgtcttatgtggctggagcaggagtaagagagcatggagaggtgctacacacttttaaacaaccagatcttctgagaactcactcactgtccagtatcaagggggaacggtgctaaaccattcatcagaactccgcccccgtgatccagtcacctcccaccaggccccacctccaacactggggattacaactgaacatgagatttggatgggaacacagccaaaccatatcgctctgtgttgtgaaggtattttgtagatgtagttaacatcaacagtaaattgactttaagtaaagaagattaagatcactctcaaaaatgtggtggatcttatccaatcagttgaaagggcttaaaagccaaattaatgttttctagagaagaagaaattctacctcaagactgcggcatcaattcctgcccaagaggttccaacctactgacctggcctacagattttgaacttaccagccccccaaatcatgtgaaaacacacacacacacacacacacacacacacacacacgagtatatatttagagacagagagagagatccattggaactactgattctgtttctctagaggacctgcactaatacatttggtgatatggtttggctgtgtccccacccaaatctcatctcaaattgcaatccaaatatgtcaagggagggaccaggtgggaggtgattagatcatgaaagcagtttctcccatgctgttctcatgacagtgagcgagttctcacaagatgtggttgtttgacagtatctggcacttccccccttgcttctctctctctcctgccactttgtgaagaaggtccttgcttccccttcaccttccaccatgattgtaagtttcctgagacttccccagccatgcacaactgtgagtcaattaaacctctttataaattacccagtctcaagcagttttttatagcagtgtgaaaacaaattaatacacctggatacaggaaaaggttttttaataaataaaagcttttcaataaataaatctgacaacacaaaaaaatcttttgcattgcaaaaatgtaaacaaatcaaaagacaactgatgaactagtagaaaatatttgcaaaatacatcacaaataaagtgctaatgtcctcaaaatataaagtgcttaaagatgactgactgggatcagctactgggcacctctctcccagagaggaatcaaaatcatgagtaaacactaacacttcaagtagatcatctaagagagcatgctgaaattcaacagagaaatgacaggaatcacagacagcctaggagagctaagatggcaccctccgagctggtacaggcagagttgggagaggctccctaatgtgggcaagtggtgggcaagtgagagaccccaggtgtccacacctctgccatgggcctttaaaatcctagacatgagaaagaccactcaagtaccccagacctccagggagctgcctggagacagcacagaggcacccctcaaacctgtgtggaatcct

SEQ ID NO: 95862 - DNA, 13080 bp, Homo sapiens
ctgcctcagcctccccagtagccaccacgcctggctaatttttgtatttttagtagagacggggtttcaccaagttggccaggctggtcttgaactcctgacctcaagtgatccacctgcctcagcctcccaaagtgctgggattactggcgtgagccaccacgcctggctgaactgttctatctatcctatctggagatattgcacatggtcaagcatatgtacttgctgaataaccagctgtgtctctttgaggatcatcatgacacaattgctaacatggtaatctaatcgccttgctttgcttctcaaagcttctcacttctcatctcttttccttcactcttactcttctgaaattgtaccaccaaataaagcttcacttaatttccagtcaggctcttgtttctagagaacccaggatacaacagcaacaaaatccaaaaggaagtaaagaaccttggattaggaatcgacacacattagttctaattttgctataattggttctgttattaattaactatttgatcttgaacaatgaacattctgaattctgtaaaatgggataggagttagagaagagggactaagcttcatgactgctgggtcccttccagttccagcgctttatgatccttaggaattaaaaacctcaaagcctcaaataacccattagaaaatgggtcagtgtgaaaaccatggagtcctatatatcccaattcatttgaccacatccatagtttggatcagctttatgaaatacatctataacctaatcttagctctgaaacagggccattttcattatcatcagcagccaatgttatttgacgtgtaacagtatattctgcaacttaaccaaatctcacaaatccaataaaaccaggccacagaaggacttatgagaattacaagaccacatctgttctgaggagaagttataaatacaagaatatttcaaaaaaacaaatatcaagcagtatcaagtgaaggaagccagtcacaaaagaccacacatggtaggtataattatgtttatatgaaatgtccagcattggcaaatctatagagacagaaagtagatttgtggtttgcctcagaccggaagctggggaactgtggagtgactgctaaggggcatgaggtttcttttggaagtcatgaaatgttctaaaattatattgtggtgatggttgtacaactccgtgaataagcttaaagccactgaattatgtactttaaatagataaattgtatgatgtgtaaattatatctcagtaaagctctttttaaaagtaatgggctttgggaggccgaggtgggcagatcacaacgtcgggagatcgagaccatcctggctaacacagtgaaaccccgtctctactaaaaatacaaaaaattagccaggcgtggtggcgggtgcctgtagtcccagctactcaggaggctgaggcaggagaatggcgtgaacctggaaggtggagcttgcagtgagccgagattgcgccactgcactccagcctgggcgacagagtgagactccgtctcaaaaaaaaaaaaaaaagaagaagaagaagaaatggggctgttttattgtggggaatgaactggctcagaagcaaaaatgtgtgaggaacaaataggcatttttctgtaagaacagagcatttttaaagattttatcttttaaatggctctggaaggggaagcatatagtaactttatttctgtttgacactaaatttccccaagcaacaaagagccaggatctttgaggacaaataacaggaaaaacttaggaacctgtgcaactggcagagaagttttaatgtgagcaaatgcaagatgacacatttggtgtgaagaaccctcaactagcatcaatcacaaactacagaagggacctgggagtgagcggattattcaactcaacagaacattttggagaaagctatgatatacaaggtattatcttaagagctgtagtaaagagggaaatataaagatgatataaatagattcccaccccctcctcgatttcaaagagcctttaagggacagaacatgcacatttcaaggccaggtgaataaatgctatgatagagtctgcataggttctagaagggtaaagaaagccttcatagaagaactagaattttctctgggccttaaacatctgagaataccaagccaatatgctggataataaatacaaaaactaaattattctactcttatttaaaacaagagatattcttagtatgggtcactatatttctttctttcttttttgagatggagtctcgctctcttacccagactggagtgcagtggcacaatcttggctcattgcaacctctgcctcctgggttcaaacgattctcctgcctcagtctcctcagtagctgggactacagccgcacaccaccacgcccagctaattttttttttgtatttttagtagagacggggtttcaccgtgttagccagaatggtctctatctcctgacctcgtgatccacctgcctcagcctcccaaagtgctgggattacaggtgtgagccactgcacccagctagggtcactatattttataaggtaaagtaaaacttcatttatatagagacaggtttctggacaaatccctggtttcaaattcagaaacacctttaaaaaatagtatttaagtttcagatcaagtccctgaacacctggcaacaaaaatagccaaaagtgctaaagagctgcactggctatttgtaggaaaagccttcttccaatctgctgacaatgtgtacgacacaaaggagaagacaagaaggtaagtggagagagctgtcagatagaacagagattagaagcagaagcagaggttggaaatgatgacagagtaggcagcaaggttgcaagtagcagacactggcacataagaaagccagttacaaaagagggagaaaagaaactcattctacagcctaatccaacaaagagttaccagctcataagcagcccttgaaggcagcgagggaagacagcatgcaaagagtgcctaaggacatgctccttagtatccacactaggtggatacccagaagcgtgaaaaccaaggcagttcaagggcccaggggagaaggggctgtgacagtgctgagctctacagtgacaaattaaatcattcagcttcatgccctgcaccatatatatctacaacacagaacactgacattcctaaacatgaccttgaatcaacaatagattaaagtaagataaacattctctgtttaaaaaggtacatcttagaaatattcccttcaaaattaaagtcaaaatatttggggcagaaataataaaatcctcaactatacagcacacttatttttttagtccccaaatggcttaggcactgatgacctaggacaacagaaatttcattccataatggaacaagagggcagaaatgataattctatgacgactgcctaaaaaaagaaaaggtgagaagccacttaattacataaaataatgaaaaaggaaaaaaatccctggcacactaacttattcctcacatctgaatctgagaatacttggattaagggcttgagctctaagagaggaactgagacaggcccctgtgtgcaaacattttatatcccttaaaaatatataggctcagtgaacaggaggaaactgtttcttatttgtctctctatcctccacagtacttagacataatgtctagtatacaacataaactttcaaactgtaacactcttctctgccacttaacaactaaatcttatttcactgtgtacttgctgctgcttttgattagctcagaagagtaaggcagtaccctcctacatttttcagctcttgacacaaagatacatcaatggggaaatcctatgtccttcctgactccctactcttatgtgatttacagatgcaattttatcattatattctcttttctctcacttcccacaacctagacattccagcttttctcaatatcatagttacttaactctgactccttcacagtcaaaatctaggggcagatttcagggacaagtctcaatgcatttgggagagattatggtttcagtctgggcttaaagtagacaaactgtaatgtccatggatgctctcacagcctcagtcctaaagaaaagtgtagggttctcccaagcttcaccaagattactgctttttagcaataaagggcggccagtggtctctcactattagtctggccctttggctggactattatcattaccctttatgctttgaattgtttagagcttctgatataggccataaatgtgtaactactcatcccagtttgttatgccagtccaatttacctgctgctgtcagggaagtccataaagtttgacatttgacatttgaatcagaatgttaacttttcaaaaactattattactcgttgcattaaaataagctggggtgggtggttatgaatgttgcaggatctttgctttaaatttccagcctttgtcatggtcttttctaatggcgagatgcattaacatttcccatatggtgttaaatctgaaatacggccagcaatcactttcccccaccattttctgataccggacgtaatacttctctttcaaagatggcatgcacatgcttgctgaacaaatgaagtgtacaggtacatgagtggctagggacagttcattcttcctgaccatgtcttttgtgagatgcacaaagctgctaggcttccagatagtgaggtcagtgggaaatgtgagaaattgtaggttagatacaagtgcaggaaatacaatctgaacagccttgctgcaacatatttagatagtagtctgtatactctttcacagtgattttgtcatttattttcctgatgtaaataaagactttattttcttgtgtggtgatgcctttttactttgcaataaacatttttggcagcaataaactttaaaaagttcatgtttataaaaatttaagtcccaaatttccttctcaagtaagttgattatgaatatgtataccacacaaaatactgtatccaccatggggaccacagagatgttacttccaatattaaaactagaagacacggtctttctgaagaagtatcagtattacttcaaaagttagtagctacaggctgggcgctgtggctcatgcctgtaatcccagcactttaggagaccaaggcaggcggatcacttgagaccaagagttcgaaaccagcctggccaacatggtgaaaccccgtctctactaaaaatacaaaaattagccaggcatggtggtgggtgcctataatcccagctactcgggaagctgaggcagagaactgcttgaacctgggaggcagaggctgcagtgagctaagattgcaccactgtaccccagcctgggcaacagagtgagactctgtctcaaaaaaaaaaaaaaaaaagtatatgggagaatgtacataggttacatgcaaatactataccatttatataagggattttggtatcctcaatgggtcctggaaccaatcccccccagatacagagggactactgtaattttttttgtataaggagtatgataaaggttgaggttattgcacaaggatatccaatttttccttggtacctttgttaaaaaaaatcaattgactgtatatatgtgggtccatttctggactctctattctgtttcactgatgaatatatctatccttaagcctaaaccatacaattttgattactggtgctttaaacttaaaatcaatgacagtgaaatctccagccttttctttttcaaaattgttttggctattctacgttctttccatttccacatgatttcagtttgtcagcttcttttttaaaaaagccagctaggaagagtttgtatagaactagtacaacgtataagtaaatctatctaggaatacagttttatttttggttttgagattttaaaccattaattaaatttctttaaaagacataggactactccagttatctttttcttcctgggtgagctttggttgtttatgtctctcaagaaatgtcatttcagttgtcaaatttattagcataaatttattcatgtatttatgtattttaatataaaacagtctaaagtccaccaatgtataaaacaatttttcaaataaatattttgaaaattaggctttctgctcctcccgtttgacaacagcatcttcttgtgcagggccagctgcacccctgggacaccatggtgaaggtgaaggccagggtaaatgaatttagttgtactggtcacctggtcaccagggctgcttttaactctggcaaagtggatattgttgccatcaatgatccctttgttgacctcaactacatggtctacatgttctagtatgattccacccatagcaagttccacagcatcatcaagcctgagaatgggaaacttgtcatcaatggaaatgccatcatcatcttccaagagagagatcccaccaaaatcaaatggggtgatgctggcactaattacatcatggagtccactggtgtcttcactaccatgaagaaggctgggactcatttagacgggggaaccaaaaaggtcatcatctctgccccctctgtcgacgtccccatgtttgtaatgggtgtgaaccatgagaagtacaaaaacggcctcaagattgtcagtaatgcctyctgtaccaccaattgctcagttcccctggccaaggtcatccatgacaattctggcatcatggaagaattcatgaccacagtccatgccatcacggacacccagaagactgtggatggcccctctgggaaactatggcacaatggctgtggaattttccagaacatcatgcttgcatctactggcactgacaaggctgtgggtaaggtcatccctgagctgaacaggaaggtcactggcatgatcttccatgtctcccaccaccactgtgtctgtcagtcatggatctgatctgctatctagaraaacctggcaaatataatgacatcaagaaggtagtgaaacaggctacgtgcagtaaaactcatgcctgtaattctagcactttgggaagacgaggtgggtggatcagctgaggtcaggagttcaagaccagcctgaccaacattgagaaaccccgtccctactaaaaatacaaaattagctgggcgtggtggcgcatgcctgtaatccaggtactctggaggctgaggcaggagaattgcttgaactcgggatgcggagggtgtgatgagccgagatctcgtcattgcactccatcttgggcgacaagagtgaactctgtctcaaaaaaacaaaacaaaacaaaacacattgcctctacctccccctttagaggagcttagaaaaaataaaagtgaaaaaatcctactgaaataatatcagaaagcacactgtagtcttatattacctccatttcaaatccaactttcagaaaaggaagaaaactattttgggtaaccaaataacaagtcccttttaagtcccagaatttaaagatcactgaaaaatgaaaattatgtcttgtactcaagatgctctggaaattatttttgaattcccacaccattatcattaatggacaccagctgtgggctcacagtatcatgggtatattacacaataaaaacatagacaggatgtcactgcacatatgccatgcacacagcttggttctaactagcatcactgagaatagacatttattaaagaagatagtgtagcggttaagagcacaggctctggagtcagaccacctgggttccaatcttggctcagccacctatgcaatgtgtgaccttgggcaaattatttaagtcccatttcttcctttgaaataactcacaaagttgctatgagaattaaacgaaataatgaatatacagtacttagtatagtgtctaccccttagtaagcactcaataaatattaaggattatcactattggtactactgaataattataatgctaaagaggtcctggtaggactagggtttacaaaaatatatggcacagtttctcagctttcaagaacttacaatttagaaatcaattcaaaaagcccaaaaggaaggggtaatgaaggaaggaaaaataatgaagagtatcattttcctattaagacctgaaagttaataaaacaaaatcactttaagtcacccaacccaaacaggtaaatatttaatcgatttagtgtcatttgaacactcaacagagttaataacactatgcatatgatggaggttgagtacgatctagtacacaggttgacttagacagtttaatataaaagtttgggactgggtttatccttgagaatatattgattttggtcatgatattgatttcatgacccacccatccttaaagagccagctgagagactgctaccacctaccaaccagctaacagtagtcaataagcatataaactgacctacattttgtaagaaatatttttaactttaaaggtcaacttatatgcagtgctttagagtttacaaagttcctgcactcattactttttatctccataattgggagatgaacatgacatccttcacaacaattctagggccttcattcaaaacagatgatacagtttgtcagataaggtgactttatatcattttactcaaccagttccactttttttttactcttaatgttttgagattaaagagtaaatatgctatgcactgattgtttttcaaaaacaaaactgacattcagaaaaatgaggttttcaactccaggtgctctgatttgctgtaaagctaaagcataaattaccttctcagtttcacctcccactgtctaccccatgttttctgctttatcttttcaagatttttctccacagatgtaggtgtccaggttcttgttttcaatttaaatcaaaataattcaagaaatactcaattcaataaatcaattcaagaaatacctactagctctactagctctgggtggctgctggagaggtccacagataggtaagtctctgccttcacagaattcacaatctactttcaaaagctataatacgaggtcaaatagtaagggccacacagtcgtttacgatgtgatagggattcaaagattggagagcgccctctggtggaaggggaagagatgatcaacagagacttcaaggcatttaaattttacacagaatttccataggaagaactgaaggaagacaggcattctggggaaaaggcattacgcaggaaactagtggcaagggggtgttcacggaaaaatgagttgttcagatctatcagagttgagagaacatgttatgaagggctttgaatattaggctgggaggtcctatagataactcgatattaaatgagtcatcaaagtttttaggcaggagagttaggtgataagaactttactttgggaagattcatctgatagaaagtgtgtaagaagagtccaaggggagactttggagttggaggccactgagagggttactacaatattttagacgaagtgaaactgctctttcaagattaaaagtaaagggaaggagtcagagaggttggtagcttaaaggaaaaataaaattgggcaaagctccccctcagttcttttccttaaaggggcaacaaagacctgagattgtatgaaggcagaaaagaaagattagtagagaacaaaatattattgatgctagtggggagaaaaagatcaatcactgaattaaagtccaagaagaagagggatggaatggaccaggtggaggtattcattttgaaaaggaaaattcccgtaattcaaaagaaagagagtataaaagggaaaagagtgaaaatacatggaaacttattgagacagaggaagttgaagaatttatggcaaataatctcaactttctcagagaataggaggcaagctcatttgcatggagaactggggagagactaggtatgtgccatgaattaggtgtacttagaaaagacattgagagggatataatcatgagcaaaaaagtactggttaaaatattgcttagacaccaaagtaaatgcaaccaaataaaaaatagttaaaatggtcatattcaaaatgtaaagacttttgtgcttcagaggacactgacttaatcagtgttaggctgctataacaaaataccatagactgagtagtttataaacagtataatttattgcttacagttctggaagctagaagtccaagatcaaggcaccagcagatttggtgtctggtgagggcctgttcctcatggatcatgccgtgttgctgcatcctcagagggtggagggcagagacaagccccttgagcctcttttataggcatactaatcccattcatgatggtggagccctcatgacctaatcacgcctaaaggccccaactcttaatactacagcattggggattatttccaatatataaatttgagggaaatatcaacattcagaccatagcagacactaccaaaaaagtgaaaacacaacccacagaatgagagaaaatatttgcaaatttgatatctgataatcatctggcacccagaatatacaaagaactcttaaaactcagcaatgaaaaaccaaataatgcaatttaaaaataggcaaagattgaaacagatatttcttcaagtaaatacaaatggccaataagcacatgtaaagatgctcaacatcatttatcattaaagaaatgcaaatcaaaaacacagtgaactattccttacctaccaggatggtcatagtaaaaaacacaaatggacataataaaaaataacaagtgttgctaagagtgcaaagaaactggaactctcacatattgctggtggtaatataaaatggttcagccattttgggaaacagtttggcagtttctcaaacagttaaatatagagttaccatataacccagcaattaatttcattcctatatacccaagagaaatgaaaacatatagccacacaaacttgcgcacaaatgttcatagcagcattatacatgatagccaaaaagtggaagcaacttaaatgtctatcacttgatgaatgagtaaagaaaatgtgggatatccatataattgaatattatttgccataaaaatgaagtactaacattaatacatgctgcagtatggatgaatctttaaaacattatgctaaatgaaaaaagccagacacaaaaggccacttagtgcagaattccgtttatatgaaatgtccacaataggcaatttgatagagaaagaaagcagattagtggtttccaggggctgagggaatgggaaaatgggagagtgcagagtgactgctaatgggtacgagattccttttttgcagtgataaaaatgttctgaaattacatactggtgatgtttgtacaactttatgaatactaaaacccactgatttgtatactttaaacaggcaaattttatgacatgtgaatcttgtgttgaaaagattgctagcaagtttagatgacctgtattttgttccagatctattcagaatggaatcatgattttctcaggctacaacacatcatagaagtcagatgtgagggttactgtgaataaggtattgggaaggcaggaaggcagagtcaaggaatgaatagcacattgctgaaattgatatctataaagcccaggctctttcaaaatccaataataaaaacacaaacaatccaattagaaaataggcaaaagacatacaaagacatttcaccaaagaggatatactgatggcaaataagtacatgaaaagatgttcaataacattagcattaaggaaaggcaacttaaaaccatgaaatatcactacacacctatcaggatggctaaaataaaaaatagtgacaacaccaaatgctggcaaggatgcaaagaaactgaattattcacacattgtcagtgggaatgtaaaatggtacagccactctgggaaacagtttggcagtttcttacaaatctaaacatgaaactaccacataacctagcattacattcctaggcatttatcccaaagaaatgaaaacctatgctcacacaaaaacctttacacaaatgttcataacagctttattcataatagctgaaaactggaagcaatccagatgtacttcaacaggtaaaggttaaacaaactgttataccatggaatactactcagcaataaaaaaaaaactgttgatacactcaacaacctacattaatcttcaggaaattatgtggagtgaaaaaaatcccaaaaggttataaatggtatgattcaatttatatgacattcttgagatgactaaattatagaaatggggaaaggattagtagttgccaagtgtcaaggatgagagggtgagaggtgtctataaaaggcaataggagggatcatcatggtgacggaaatgttctacatcctgactgcaagcatcattgtcagtatcttgactatgatattgtgctgcagttttgcaagatgttaccatagggaaaaactgggtaaaagatacataggctctcctctttgtattatttcttacaactgcatgtaaatctacaattatctcagtttaatttttaaaaaatagctcaggttaagggggaggcaagacaaatcaaaatctggcatgcagttttcatattcataagaggattataataactactaaggaaattttttaaatgtatacaaagtaaggagatttgggaacacaaggtctcttaatgacaaatggtaatttaatattacttctaccactattgaaatggcttaggaactacaaatggctaaccatttccagaggatttattctcaagggaatgtgatggcataagtgcctcaaagggtaaattaatgatacctgaaacccataggaaaccagggctgggtgcagtggctcatgcttgtaatcctagctctttgggaggccaaggtgggaagattgcttgagtctaggagttcaagaccagcctgggtgacagaccaaaaccttatttataaaat

SEQ ID NO: 95863 - DNA, 47022 bp, Homo sapiens
gcaccattgcattccagcctgggcaacaagagcaaaactccgtttcaaaagaaaaaaaaaaaaaagatgtagagatgaaggatgagccaaagctgggtaagaataaggcttatctagagaattgtgagatttgttttgttagaacagttatgcaagcataataaagcaatgagaaaaagtgggaagatgctgggcgcggtggctcacgcctgtaatcccagcactttgggaggctgaggcgggcggatcatgaggtcaggagatcgagaccatcctggctaacacggtgaaaccccgtctctactaaaaaaatacaaaaaattagcccagtgtggtggcaggcgcctgtagtcccagctactccggaggctgaggcaggagaatggcatgaacccgggaggtggagcttgcagtgagccgagattgtgccaccgcactccagcttgggtgacagagtgagactccatctcaaaaaaaaaaaaaaaaaaaagaaaaagaaaaagtgggaagataccaaatggtggagctccttggatgtcaagttgtttgaacttcattctgtaggcaaagaagccaccataacctttttaacataggcgagattataaacaggagaatgctttaataagattaccctgggagctgtgggcctggagagtagagactagaggcagaacaaactcttaggaggccattgaaataaattactaattagagctttctgtttgtgatagccactagacacctgtggctatttatttttttcttttttttttttttgagacggagtcttgctctgtcgcccaggctggagtgcagtggcgcgatctcggctcactgcaagctccgcctcctaggttcacgccattctcctgcctcagcctcccaagcagctgggtctacaggcgcccgccaccatgcccggctaattttttgtatttttagtagagacggggtttcaccatgttagccaggatggtctcgatcccctgacctcgtgatctgcccgcctcggcctcccaaagtgctgggattacaggcgtgagccaccgtgcctggtacttgtggctattgactacttgaaatgtgactcggtgagagtgagatcctttttttttttttgagacagtgtctcgctctgtggtccaggctgagtgcagtggtgcgatcttggttcactgcaacctccacctccctggttcaggcgatcctcccacctcagcctcctgagtagctgggaccacaggcatgtgccaccacgcctggctaatttttgtatttttgtagagatggggttttgccacattgcccaggctggtctctaactcctggactcatgtgatccgcctgccttggcctcccaaagtgctgggattaagcaagggccatcatgcctggtcccgagatcacgtctcttaaaaaacaaataggctgtgtgcagtggctcatccctgtaattccagcactttgggaggccaaggtgggtggatcacctgagttggagttcgagaccaccctggccaacgtagcaaaactccatctctactaaaagtacaaaaattagccaggcatggtggtgtgcgcctgtactcccagctactcgggaggctcagtaaggagaatcgcttgaacccaggaggtggaggttgcagtgagccgagatagtgccattgcactccagcctgggcaacagagactccgtctcaaagaaaataaataaaataaaataaagtaaaagcactagactattagtagttaagagcaagttaacagtatccaaatcagggctatttagtcaaagataagatagactttgagcttgaaaactaagggaaaattttcatctctttcaatacttgggaagggacaggatcttccatatttaggaaactgagttgtcctaaactcactgtatttcatcttgaattttctctattttcctgagacaagtggaaactgtgaaagcagtcaatgctgttatattgcctgtgagctccgtcgaggccaccagaatgccatatgctagctatactatgcgtacgtatgtgcgcatataacacacatctctgccccttttcagcagtggactctgggatacaggccagaccttggaagagtgtctaggggcttaagaacttcatgttcttcatagctttgcctttttttttttttttttaaccccctcatacctttgtcctttgagagagacagttaagtaggtaaggtcttcccaagtcctcacaccattacactctggccaaaaggccttgtgtttgaaacaggcctgatctacacccctcatgtcctcggcaccgacgaaacacgatgacatgagaaagaacttggtgtttaagcctctgtgcctggcaatcttgtgatgtcttttttttttttttttttgagatggagtcttgctctgtcacccaggctcaagttcagtggtgccatcttggctcactacaacgtccgcctctggtttcaagtgattctcctggctcagcctcctaagtagctgggattagaggtgcccgccaacacaccaggttaatttttgtatttttagtgaagacagggtttcaccatgttggccaggcatgtctcgaactcctgacctcaggtgatccgcccaccttggcctcccaaagtgttgggattacaggcgtgagccaccgtgcctggcctttgtgatgatatcttaatttttactgctaatgatgctctactttagctgcaagaaagctcaagggaagtctgcctcctggctcttagagagcaggaacagacgaagacgtgaatcattagggggcagaaggcggactatgggctccaagatggcctccagagattctcttcctcctgatattcatgtccttgtgtagtaccaacctacactgaatagggatgacctgtgtgataacaggatattgcataaatgatggagtataacttcccagcctaggtcataaaagacattgcgatttgtcgttttctcatccttcaatagctctagggaaggcctgctgccatgttgaaaggacactcacgtagtcctatgaaagcctgcattgtgagctgaggcctcctgccaacagccagcaccaacttgccagccatatgagcaagccaccttggaagtggataccccaacccactacactttcagaggactgcaacctcttgaaagattctgaacaagaaccacccagcttatcaatcctgaattcctgactcacagaaactgggataatacatacatacatactactgtttaagctgaagttttggtgtttttacctagcgataggcctctaatgtggtagatgaatattttgtatgatgttttgtcattgaaacggctctcgattttcaagtcattcctttagaatctggctagtttctctgaagctctatgcttaccattcttgtacttattctggtgtatacaaccagaaagttggcttctctctaggggtaaataaccggagagtgataaagaacttagttctcactataataaccacagagaaaggatgcctcttgttaggttcattttacttttttttttttttttgagacgagtcttgctctgtcacccaggctggagtgcagtggcgtgaccttggctcactgcaagctctgcctcccaggttcatgccattctcctgcctcagcctcccgagtagctgggactacaggtgcctgccaccatgcctggctaattttttgtatttttagtagagatgggatttcaccgtgttagccaggatggtctcgacctcctgacctcgtgatctgcccacctcggcctcccaacgtgctgggattacaggcgtgagccaccgcgcctggcctcattttttttgaaaaaaaataaaaaataaaaaataaaaaaatctaagcttaatcatagatttaccttactctgctccaaggcaatttttcaactttttaaaaaataaatgttttctttcagtataatacccaaaaaagtgcacaaaatgtcttgataacatattacaaagggaacacacccatgtaacccccacccagatcaaagaaacagaatatcattagccatctagaagcccatttggtcatcttcattttctttttttttttttttttgaggcagagtcccactctgttgcccaggctggagtgcagtggtgcaatctcagctcactgcaacctctgcatcccaggttcaagcagttcttctgcctcagcttctggagtaagtgggattacaggcacgcaccactacgcccagctaagttttgtatttttagtagagacagggtttcaccatgttgggccaggctggtctgaaactcctgacctccagtgatccgcccgcctcagcctcccaaagtgcttggattacaggcatgagccactgtgcctggcctaattttttttattttttattttttgtagaagtggtctcgaacttgtggtgtgccttcttatttatttattcatttttttttagagacggagtctcactgtctcccaggctggagtgcagtggcacgatctcggctcactgcaacctccgcctaccggattcaagtgactctcctgcctcagcctcccaagtagctgggattacaggtgcccaccaccacgcccaactaatttttgtgtttgttttttttagtagagacggggtttccctgtgttggccaggctggtctcggactcctgaccttgtgattcgcacgcctcggcctcccaaagtgctgggattacaggagttgagccactgcgcccggccgctttcttttggttatcataaggcgggcagtagctgaacttctcaggagtccaagctctgtcattctttaggctttgtgcttctggataagttacctcatcatccaaatgttactgcaaggactaagtgagatgtagaggcagtgggcaaattgtgtaaaaatactactgtttcaagtgttttgatgttggagttcatcttgccagccaagggatgatgatactttgattcttcaggatgatcagagctcagacttggacggaagctccctcaggtcaaggaggaccacattttttggggggtggagagaggaggcagaaagagaggcaatgtcaggcactgagatttagaagagtagctatagctgtttttggttcttgtagatccgtctgtgttggcttcctacaggagctagaattttcagagctagtcctacagtgaggggagctaacgtggagtgggcgtgagaattctattcagcaagcacaagcgaagctcaacctttttgttcagcctgctacaaccaatcattatgggagaggggaataaggatcactgcccaaggggcattaggatcactgcccagtgggcattacagtctccccagggaggcactcttttttattttttattttttttgagacggagtttcgctcttgttgcacaatgttgggtcactgcagcctccgccacccgggttcaagcaattttcctgcctcagcttcccaagtagctgggattataggcatgggccaccacgccccgctaatacggaggcacttttaattagcccacagtccagtgaaatttgacggagtgaggaagtgacctcagagtacagaacgggatgggatccttccgggcttgggcagcctttggtagtggggatgcttggaagggtcagggtctcagtcctggaggtgaccaatttttctctccaaaagagaaaggaagatgattaaaaaaaaaatccatgctccaaagcggcagccaaatccttctatggcccccaatgcatcacccagaaaggggctccagactctcctgcaaaaggccaactctacttcccggctcccacttcccctccttcgccacaggagggtggcgaaggatttataacccacctctttctttcagttgccatggagacaagccccagtcctttcattccttctggtacctctctctccaacgcaggcggaaaggaggcggcttagcccaaacatgctgggggaggggctggcggcctcgacggcagctgcggaactaggccgagggacaaaggctaaggtcagcccgcggttcaagccctttcgtctgccgacgaccagcggccagacgctgcgggagcactgctgggctggaggagggctcgagctgcgaggacggcacggagcagcggggtgggactcggggtcgccccaggagagttccgcggcccgggggggcagaggcatgcacaagtggggggcggaaggagggggtggatgaggaggctcgggcccttccacccacgcgtccattgggcggcgccgccatcactctcttctgggctacaccgccttctcttcctccgcggaacccggatcccctcctccaccaccctctccccgccccgtcacgatagcctctcattggacggaggcacggtcaatcctcctcgagttagggagccgactggacgcgaggcctttgggccgtccccagcctcgtcggattggcttcctgcgcgttggcgcaacggaagaggcggccggccgagggcgcgcctctgctctggctggactgccgcggaggaggcgagaaggaatccgacgctggggggcttgctcgggcggcagcgactgctgctgcggatgggagsgggccggctcggcgcgcccatggagcgccacggcagggcttccgccacctccgtctcgtcggctggggagyaggcggccggggaccccgaagggcggcggcaggagccactgcggcgccgggcgagcagcgcgtcggtgcccgcggtcggggcctcggctgagggcacgaggcgggatcgactgggctcttasagcggccccacctcggtctcccgccagcgcgtcgaaagcctgaggaaaaagcggccgcgtaagtgttccgtggggcgccctcccggcccgccctgccccmccttccggcccaccctgtccccttccggccccgccgccgtttttcccgcgcgcggacactgtccccgcacggtggtccctcgttggtgcgtggcctgacatccggctggaggcctcgggtgctccgaaagcggtaccttcgggggcccccccgcacccattggtatgcacttcccgcttgttggagtggagggcttttccccaggacctgtcctcccttttcttagctccttgggcattctcttcctgagggtcacatgattttatcctcgagaaggcttcttttgactcatttccacctcctttcctcccaaatcctttgaatccccaatgtttgttttccgtgggtttccaaagagctgctctctaatactttaagtcccttttattcgtcaatttcgggcttactggaaaatggtgaactgcccyttgagttgcaccaggcctgaaactgtattccgtgcacctctaaggtggctgcccttcttctcgtgagaatccaggtcatctctcacycacatatcccctccgttttccttctgtctatttgcaggtactcacgattcagaactgtggcattctgggcattaaggctctttgttttgaggggaaacaacatctttctgaattttgccttgggagttgcatacgctcctcccagagaatccgtttccccattttattaggtttctttttctgtgttgtgtattttctcccctttacaagtcttcaattcaggaccgctgcctggcagccattgctgctgttgaaagtatcaattgtcctgatactgtaatatgagctttacagtgtgatgccattttacatatggttggactttttggtgggtgttgccagattcctatttcaggaaattgacttgtttaaatgcagattgtgagagggagggaaaatggcaagatgtgagatttttattgaatagtcttctaccttagcccagtcacccaactgcttttttgaatcttctctgatatggatgattaaatgtagttctattttgctgtgaaaagtttgggagttttcagttcttttgtctttttccatcttcttgcaacagatttggaaaacagattcttaacctgtgccattttcagagtcagtcacctagttttgttttatttgagaagcacctgagtttgaagcaatgcaaaatatgagatccttcatggttttgtattacatcgttggaaatggatgtaaattccaaagattcagcaaataagagtatagccattagccacaagggtttttttggtttgttttttgttttttactttgagacagcgtcttgttctgttgcccaggctgaagtgcagtggcatgatcatggctcattgtggccttaacctcctgggctcaagccatcctcctgcttcaacctcctgcattgctgggactaaaggcacgtgccactatgccaggctaatttttcaatttttatttttttaaatagagatgggatctcttatgttgcccaggctggtcttgaattcctcctggtctcaagcgatcttcccacttcggcctcccaaagtgctgggatatagacgggagccattgtgcccgacctggcagtcgtctactaagagctttggtaactcattagcctcgtggctctgaggtaggtggtagtattccattttacagatgagaaaactgggacacgtttgcccggtcaaatggctagtgcgttgtgaaatagaaatgtaaactcagaattgctagcttcatagcttttgcggtggaccactgtgtttttctgaattatttacgttctgttagttatttcttcattgctctaagaccaagcataagtttgatcttttgtgttcaagactgacttacttgaggcgaaaatttttagatactgtggaagtacttccaaatattgagcatgagaatgacctggtaaaagtgcagattcagtgggcccagttaagctcctcatattcaaatacaggtgactcaaagaccacactcagaaaaaccggtttacactgggtggggagaattatattaaggtagttttgaaacttattttagggaactaagtagacacatattcatgctataggatttatattttgttttgatgtttgatgtttgtcgtgattcccttcattatcttctctggctgataaatcatgaaaacccatctttccagtataagacctgctaaaggaatgaacaggatactgattgttcttccttccatttgtttcttctgtactatctaggggtgcccctgttaggtggagaagcaggctgggcgcagtggctcatgcctgtaatcccagcactttgggaggccaaggcgggtggatcacctgaggtcaggagttcgagaccagagaccagcctggccagcatgttgaaaccccgtctctactaaaaaatacaaaaattagctgggcgtggtggtgcatgcctgtaatcccagctactcaggaggctgaggtgggagaaacatttgaacctgggaggtggaggttgcagtgagccgaaattgtgccagtgcactgcagcctgtatgatacagtgagactcctcaaaaaaaaaacaaaaaaaaaggagaagcagcttgttgactgccgaaccctcctagagtatacttcagtcttatctctgagagaattcaactaagactaaatcttttttatttattgttgggaggtttgggtatggaatggtgccacctttctggtgaaaccctatctctactaaaaatacaaaaaaattagccgggtgtggtgacgcgtgcccgtagtcgcagctactcgggaggctgaggcagataattgcttgaacccgggaggcagaggttgcagtgatcgaagatcgcgccactgcactccagcctgggcgacagagcgactctgtctcaaaaaaaaaaaaaaaaaagccttactctgataccgcactacttgtctaaaggtgcagatagatactagttgtcatttgaaagtcgaaggagctattcaggttatcttaggcattcttgtggtcctggttgtagtcgtgttctgtcacgcgtttcctagagcagtgtagttcccaaaccggcccttgtcccagacttactgcatcagaatccctagcgatgaggctaggcatgtgtatatttaagttcttcaaaagttttgcatcaggtggggaggggggtatgtctcgcagggctgaaagaaataccaaataaagattgattttaaaatgatggaaaccaagacgctaatgatggtaatgtagctaccattttctgagtgcttatttgtcttggacactatgccgagtattttataagcatcttggttaagtctcatagctatcctgtgaggtaggtgttttttatccccaatttccagatgagaaaacaggctcagtgaaattgtccttttgtccaaggccatatagtgagttagtgatggagttgggttttgattcctggtgtcttgacttcagatccagtgttcttggtccacattttggggtgggggaaggtatgtgtgatgtaatccagagctgtggttctcaagtttttaaaactttccctcaacctaccattgcatgatataggtctgcaaaggggtctaaaattatattttaaattttattgaggcataattaaatagagtaaaatgtacaattttggcaaatgtagacactcatgtaacaagagaacatacatttttatcaagggctccaggtgttgagcatatgtgcagcaggtgtgcagaaggtgtggaagccctgtgatcagagtgctccacagtagtgtggacaacaaacttatcctttgaagatgactcgcaaggcatgttgtagcatgccagggagacctttggggcttgttgattttggactcctacaaatctaaccttcataatacagtttttgtttgtagcttgacaacactagcctagaaaatggatcattttttcttggctttccgaggagcgttgctgttggcagtatggaactggagccggggccctgttaggctgcctttattaggctcagcatttcagcttcagggaattaggacggattgacccctgggagctgaggaaaaatgttagattgctatagctttgtggcccattgggagaggcaagatgggagttttttttttgtttgttttttgtttttttttttttttttttagaggagtttcactcttgttgcccaggccagagtgcagtggtgcaatcttggctcactgcaacctctgcttcctgggttcaagcaattctcctgcctcagactcgcaagtagctgggattacaggcatgtaccaccatggccaactaattttttgtgtttagtagagatgggatttcaccatgttggtcaggctggtcttgagctcctgacctcaggtgatccatttgcctcagcctcccaaagtgctgggattacaggtgtgagccaccgtgcctgaccgaaaagatgttgtttgtttgtttgtttttgagacagtttcactcttgttgcccaggctggagtgcaatggcgtgatctcggctcaccacaacctccacctcccaggttcaagtgattctcctgcctyagcctcccgaatagctgggattacaggcatgcgctaccacgcctggctaattttgtatttttagtagagacaaggtttctccatgttggtcaggctggtcttgagctctggacctccggtgatctgcccacctcagcctcccaaagtgctgggattacaggtgtgagccaccgcacctggcctgaaggtgttttttaacctattgatttatcaactttttatttatttatttatttattgagacgaagtcttactctgtcgcccaggctggagtgcagtggcaggattttggctcactgcaacctctgtctcccaggttcaagtgattctcctgcctcagcctcctgagtagctgggactacaggtgtgtgccaccgtgcctggccagtttatcaactttaagtggaaccaaagtaaatacagcctgtcttcttagatatataataaatactaagcaataagcagggactaaaaatcgtccccttatgcagctgtgtaaaatggtacagtatattactttaggggccatgtgtaagaatcatgcagttggataatatggttgtttagtgttggtgtccctgccttctatctggggagaccatagcaggaagagatgtatgttgttaaaaatattttgctgactgtgtatgctggctcatttctgtaatcctagcactgtaggaggctgaggtgggaagatcacttgagaccacgagttcaagaccagcttgggcaacatagccagacctcgtctctccaaaaataaaaagggcatgcatggtggctcacacctgtaatcccagctactcaggacgctgaggcaggagaatcactcgaacccaggaggtggaagttgcagtgagccgagattgcgccactgcactccagcctgggagacagggcgagactccatctcaaataaaataaataaataaataaataaataataataaacaaattagcagaatgtcgtggcacatggtcgtagtcccagctacttgggaggctgagacaggaggattgcttgagcccggaggattgcttgagcccggaagattgaggttgcactgagctatgatcatgccactgcactcgagcctgggcgacagagggagaccctgtctccgttttttttttttttctttttttttttctcaaaacatttcaaaaaataggaggaggaagatagactaggctattgtagagcatcaggcaatgaaaagaatggctattttgattatttaaaagagcggtgatgttttttggacttaaagtttgtagccttgtgagcttttctcaggttcataatttggggtatcttcaggcactgttcaggtaagactgactgggatgtgaaaacttttctaaattgcggcttaaagtttgctttctaaaaatgaaacccatctcagttttttagtagttcgttacattttgtgtgtttatatttcctgaatgtagaatttgttgttgaatttgctgattttacggtatgtggtcttttataagtatctagtccctgagtttaaaactattttgggaataagaataattattaaagtacctctttcaatgttaggccaagatattgctttcctagaacagcctagacatggatttgcgatgtcattaaccatctgtggtctggtaaaagtgtagttcataatattggaaaattgagcacacttttaaaagtaaactgtgtgtttctttttttttttttgagacggagtcttgctctgtcgcccaggctggagtgcagtggtgcgatcttggctcactgcaagctccttctcctgggttcatgccctttctcttggctcagcctcctgagtagctgggactacaggtgcccgccaccacgcctggctaattttttttttttttttttttttgtatttttagtagagacggggtttcaccatgttagccaggatggtctctatctcctgacctcgtgatccgcctgccttggcctcccgaagtgctgggattacaagcrtgagccaccatgcccagcctactgaactatgtatttcccattggaaagtgtgatgttgtgaaatatatatattggtcttttgcccatttcctggcatacaactcctgaaatccttagaaactccacagtgatgtccttttgtgtgctaaggagttaactgatggctggaagcctctggacttagtcatggaaagaacaagacaggattagagggttgggactttcactcctctccagcctctggggaggggtgggggcttgaaggttaagttgatcaccagtggacagtgatttaatcaattatacctactaatgaagcctccattaaaaacccaggaggacagggtttggagagcttctggatggccaaacaagaggttccaggagggtgcagtgcccgagagcacagaagttccgtgtccctcccctatactgtgtactatgcgtctcttcctctgaatcttttgaaatatctttataataaaccagtaaatgtgtttcttaggttctgtgatccagtctagcaaattaatccaaaccaaagaggggtcatgcaaactccaacttgaagccagttgatcagaagttctggaggcccagattggcaactggtgtctggcagaggtgtggtggaggagcagtcttgagggacttagccctcgacctgtggcatatgatgctatctccaggtacatagtcgttggaattgcattggagggcacccagctggtgagtgctgcagaattggttacttgctttgtgtgtgggctcacagaagtcttctgtgttgatcgttgctgtggtgtgagagcagaggaaaaactttgtttttccacactcttaaaggatttcagtcgttgagacctattatgggaccttgtgctttgcatacgttttgaaatgtggcctaagtcaagtataggttgtctagactgagtaccttggaggtcttaatatcaggaaatatgttaagggctgtgaatagactgaaatatctgaaaattaatggccaggactcactaactagaaggcrggggccttctcttatcagtgagctctaggctggatgtgttagctcacgtctgtaatctcagtactttgggaggctgaggcgggtggatcgcttgagcttaggagtttgagaccagtccgggcaacatggtgaaacctcgtctctacaaaaaattagctggttgtggtggcctgcacctgtagtccagctacttgggaggctgaggtgggaggatcacttgagccagggaggttgaggctgcagtgagcctgaacctggtgattgtaccactgtactctagcctggatgacagagtgagactgtgtctctcaaaaaaacaaaaacgaaaacaaaacctgggtgcagtggctcacgcctataatcctagcactttgggaggccgaggtgggcgaattagttgaggttacgagttcaagaccagcttggtcaacatggtgaaactgtctctactaaaaatatgaaaactagctgggcatggtggtacgagcctgtaatcccagctactcgggaggctgaggcaggagaatcgcttgaacaactgggaggcggaggttgcagtgagctgaggtctgtcgctgcactccatctgagcaacagagcgagactccatctcaaaaaaaaaaacctcttggttttaattggttatattggattttgttttttggaatctgttgagataatcatgatttttttcccttcatcttactaattggaatttctaatgtaaaagccattgctgcattactgagaagaatctcttttggctatggcctattaattttactgtacaactagattccattttttattttattatttatttattttgagatggagtctttctgtcacccaggctagagtgcagtggcacgatcttggctaactgcagtctctgcctcccgggttcaagcaattctcctgcctcagcctcctgagtatctgggattacaggcgcccaccaccatgcctgactaatttttgtatttttagtagagatggggttttaccatgtcggccagactggtctcgaactcctgacctcaggtcatccactcgcctcggcctcccaaaatgctgggattataggcatgagctgcctcgcccttaggctttcttgctgagtatatttaataaatatgtaaggctagatgtttccgtttaagtactactttgggtatatcctattggtttctatatattgtattctcaytgtcattcatttaaaaataaattttgttttgatttcctttttaatcccagagttaatagtttaaaaatttcaaagtagatagatttatttctttgtttgttggattaatttctaattttgaagttttgcagtaagtgaatgtgacttgttctttggaatttgaagttctttaagctagtgcagttaatttttgtgagtgctttatgggtttttaaaggaatgtttgcatggttttgtttgttttgggaaacagtcttgctggtcttgagtgtttttttttgtttgtttgttttgggaaacagacttgctgttgtctaggctggagtgcagtggtgcgacctcggctcactgcaccctctgcctcccgggttcaagtgattctcctgccttagcctcccgagtagctggaattacaggtgcccaccactgcacctggctaattttttatatttttagtagagacggggtttcaccatcttggccaggctggtctcaaactcctgaccccgtgatccacctgcctcggcctcccaaagtgctgggattacaggcgtgagccaccgtgcscagccgggtttttttttttttgagatggagtctcgctctgtcatccaggctggagtgcagtgatgtagtgtaggctcactgcaacctccacctcctgggttcaagtgattctgctacctcaggctcccaagtagctgggattacaggcatgtgccaccatgcccggctaattttttgtatttattggagacggggcttcaccatgttagtcaggctggtctcgaactcctaacctctggtggtccacccatcttggcctcccagagtgctgggattacagatgtgagccattacatccggctgtttttttttyttttccccagagttctatttgtgtttactagatccaccttattagccatgatattaaaattctctttctaccataattttgtaggtgtgtgtgcaatctacaaattcctgaggtctgtgtcattctcatactgacttgtagatgtgtcagtttctctgttagtgttttcgaagtatgtgttatgtgcataaggaacatggctattacattcatcagttgtacttttttttttttttttttttttgagatggagtctcgctctgttgcccaggctggaatgcagtgctgcgatcttggctcactgcaagctccgcctcccggcttcacaccattctcctgcctcagcctcccaagtagctgggaccacaggcgcctgccaccatgcccggctaatgttttgtatttttagtagagacggggtttcaccattcacaggatggtctcgatctcctgacctcgtgatccgcctgcctcggcctcccaatgtgctgggattacaggcgtgagccactgtgcctggcccatcagttgtactttttatgcacatgagagagttttttttttgtcccttcttaatgcttttttgtttgtgttgtttggtctgctagtattgtatctgcttgctgttaacatttgcttgatacagtggagtagcattctccaggcatttattttagtcatttaaattcaagtgtataaattcagcaagtgagttaagtgaatggtgccagcgattctacccagtgtttccgtcagtaactatatgattatgagtgagtatagggatgagaatggtgactctcctttcccctgtagggaaaggaaggggcgtgattgtctggaggggcacctcttgtaatgtgagcatagctctttgccaaatgaaacactggtcttgaaacaaggtatgacctttactgtactatggctcttaaatgtaaatcagctgctctatctagtattcatctctagtgaggtgcttaagagtgcttaacatttttataatgtgtaatacttttgactaaatgccattttcatctttcaaagcattcaactcctcctcatggtgtgactccattgtgggtgatttaccatttttccttcagtttacttgtataatcttgtttgaggtatctttttacatcaacatatacttgaatttctccttttctctcctaattcctggttaagctcacagaatttcctcttcagtctagaagagaaatttgacctatttgtgattactgataagtgcagtcattcccatcatttatttatttattaaattatttttaagttttttttgagatgaagtcttgctctgtcgcctaggctggaatgcagtggtgcgatcttggctcactgcaacctctkcctcctgggttcaagcgattctcctgtctcagcctaccgagtagctggggttacaggtgtgyaccaccacacctggctaatttttctatttttagtagagatgggggtttcacgatgttggccaggctggtctcgaactcatgacctcaagtgatccacctgccttggcctcccagagtgctgggattacaggctttattatttatttatttatttatttaagaggtaggatcttgctctgctgccaggctggagtacagtggctgtatcacagctcactagcctcaaactcttgggctcaagcgatcttcctgcctcagcccctggagtagctgggactacaggtgcacgtgatcatacctaaatttttttttagagatgtggtcttgctgtgttgtccaggctggtctcccaactcctggcctcaagtgatccacccaccttggcctctcaaagtgttggaattacaggcatgagccaccacacctggctgttttgtatttactgtacttttccccatttcttgtcaatcagcttttttgaactgattgctttattttttttctaatgtgaaagtcattttttttttctcctctggagttacctctaaattttgacacatttaaactatcacttctrtattcttgtgtagaattaatcagaatctatcttttcttcccttttccaacaagacagaactgctgcttgctttcatttccttctcccttctcttccctcttcaacttcctatgtcgaaatcatgtaagtattttagtttcagattgcttatttttgtaaaagtcagtacttttgtttatttcttaaagctcttggattaaaaaaaagtttcttaaagctcttggatgttttaaaattatggcattcatctaccaattatgttagagaaggtctttgaaaagtaaagttgatcccttacatatgtgaaaattgtttttgcactcccgcttgaaagcttatttggttggctggatataagtttcaaaatcattttccttataactttgaagccagtgctccgttgtcttctggcatctgtgctgctgatgaaaagtctgatactgacttttatgtgatttatgtatctttataggaattcagttttttccttatgatatsttgaaatttcaataggatgtgtctaagttgtcttccccttctctgctgaccgataaacactgttcagcccttagagtaacctgatgattggtgtcttccctttccccaaggaaatttctggaactaacataagatgttggtccttctggttctatattctctccctctctcttttttttttttttttagttagagacagagtctcagtctgttacccaggctggagtgcggtggcatggtcatagcttgctacgaccttgacctcctgggctcaagctatcctctcacttcagcctctcaagtagctgtgactacaggtgtgcgcctggctaattttttatttattttttatttttgagacggaatctcactctgtggccagactgtagtacagtgggacaatcttggctcactgcgacttccacctcccaggttcaagcgatttccagccaatttttgtatttttagtagaggtggggtttcatcatgttggcctggctggtctcgaactcctgacctcaagcgatccacccacctcggcctcctaaagtgctaggattacaagcatgagccaccgcacctggcctagttttttttttttcttttaaagtagagatggggtctggctgtgttgtcctggctgatcttggactcctggcttcaagtgatcctcccatctcggcctcccaaaatgctaggattacaggtgtgagtcactgcacccagccaggttccattttctctatattgactatattgacctttctttcatacttgaaaagcatttggggataatcttttaattttgttttctatttgttttttctgtgcccattttgctgttaaatatatctgtcaagttttattttagcaattgttttttctcttttataacagcgtctttaatgttgtaatttacatacaataaactgcatccatttaaaatatacagttccatgagtttcgacagatgtgtatagacacacacacacacacacacacacacacacacacacacacacacmccccttttacccccaaacaagagttgggttaccagagtttttccctcctcctgtgcagtccaaccccagctctcaagcccatgatttgcttgctttcagatgtaaaaatgattagcttgccttttttttttttyccccctttttgagacggagtctccctctgtcgcccaggctggagtacagtggtgcaatcttggctcattgaaatttactcctcctcctgggttcaagtgattctcctgcttcagcctcccgagtagctgggattacaggcatgcactgccacaccgggctaatttttgtatttttagtaraaacgaggttttgccatgttggctagtctggtcttgaattcctgacctcaggtgatccgcccgccttagcctcccaaagtgctggaattacaggcatgagccacgacgcccggcttttttttttcttcttttcctttttttttttttttttgagactgagttttgctcttgttgcccaggctggagtgcaatggcatgatctcggctaactgtaacctctgcctcctggttcaagtgattctcctgcctcagcctcccaagtagctgggatttcagcgcgttccaccacgcccagctaattttttttttttttgagatggagtctcactccgttgcccaggctggagtgcagtggtgtgatctcggctcactgcagcctccatctcctgggatcaagcgattctgctgcctcagctttcttagtagctgggattagaggcatgtgccaccacgcccggctaattttttttatttttagtagagacgtggtttcaccatattggtcaggctgatctcgaactcctgaccttgtgatccggccgcttcagcctcccaaagtgttgggattacaggcgtgagccactgcgcccagcctaatattttgtatttttagtacatatgtttagtacatacgtacatactttagtacaatatgatttcaccatattggtcaggctgctcttgaactcctgacctcaggtgatctgcctgccttggcctcccaaagtgctgggattacattcttgagccactgtgcccggccagtttgcattttcaaaagtttcatataaatggaataatatagtatgtagccttttgtgcaaggtttcttttactcaccctatttttgagattcatgaatattaaatatgtagtagtttgtcccttttttttggttttcagagcattctttcccacaattaggaaattaacatggacaaactgtatttaaattttgccaattttggctgggcatgatgactcaggcctgtaatcccagcactttgggaggccaaagtgggaggattgctggaggccaggagttggagaccagcctggacaacacagtgagaccttgtctctccaaaatagctggcatggttgtgttcctgtagtcgtagttacttgggatgatgaggcaggaggattgcttgagcccaggagttcaaggttacagtcagttgtgattgagttgtgattgcactccagcctgggaaacagagcaacacgctgtctctaaaaataaaaataaaaggtgaaaaataaatagaaacagttttgcatggattcttttgtacgttgtktatttagttgtatataattttatcgtgttaatttttgcagccayacacatctggcaatcgttttttaatttttgatttttctctatggtagctttttttatggatgagttatgattttacctctgagaatatttttgattctgtttattcctgcaactctttcttcagatatttagtttctcatttttgtagtgtttatttcccttgtagtttttctagtttgtaaaagtgataatctctggtttgagaattcctgttcttctgccagtggattcagtgtctgtttaccagttggtcaggattgattttaggggaggtatgagatacgtggcaaaatatggggtaaaatgtctccttatttcttctgggtaatagcagccacctgagtgccatcctgattctggggctccagtgcctgtttccagtgaagactttgcttctgtcagtgttggggatagaacatggttattggtagagggagtggcctgtccacttgtgccaaacacatttccccaccatcgcttgtgactgcaccactgcaccagacctgcttttgtttccccatggtagccgccctgaacctacggcttggatagaatacccctacgttctctctctcaccttcatagctgaycccagttttaatagcattcctcttttgaggcttatgcatggttattgcctctgtaaacctagttctgctgctgctatctcttttttttttttttttttgagacggagtctcgctctgtcacctaggctggagtgcagtggcatgatctccgctcactgctccgcctcccgggttcatgccattctcctgcctcagcctgctgagtagctgggactacaggcgcccgccaccacgcccggctaatttttttgtatttttagtagagatggggtttcaccttgttagccaggatggtctcgatctcctgacctcatgatcctcccgcctcggcctcccaaagtgctgggattacaggcgtgagccaccacacccggcctgctatctcttcttgtttcccagaattattttagaaaataatatatcaaatatatcaataaacccacacccttttttttttttttttgaggtggagttttgctctgtcacccaggctgtagtgcagtagtgctgtcttggctcactgaaacctccacctcccgggttcaagcaattctcctgcctcagcctcctgagtagctatgattacaggtgcccgccaccacgcccggctaattttgtatttttagtagagatgggggtttcaccatgttggccaggctggtcttgaactcctgacctcaggtgatctgccctcctcatcctcccaaagtgctgggattacaggtgtgagccaccgtgcccggcctaaacccacatctttagtaatttctacgatttagattgggaggggaagcatgtacagatgctttttgacttacgatgtttatgctacattccataaacccatcagaagttcaaaatactgtaaatcaggctgggcgcagtggttcacacttgtaatcccagcactttgggaggctgacctgggtggactgcttgagcccaggagttcaagaccagcctggcaacatggggaaaccctgtttctacaaaaaatacaaaaattaggtgggtgtggtggcatgcacctttagtcccagctgctcaggaggctgagataggaggattacttgagcccaggaggcagaggttgcagtgagctgagattgtggcgttgcattctagcctgggtgacagtgagaccttacctcaaaaaagagaaaaagaaaatactgtaagtcaaaatgcatttaatatacccagcctattgaacatcatagcttagccaaacctaccttaaatgtgcttagaacmcttatattagcctacagttgggcaaaatcttctagcatamagctagatgatttaataatgaataatataaaagataattattttacaataaaatgtcgaatatcttgtaatttattgaatactgtactaaaaataaaaaaaacaataaatacttgaagtagagtttctactgaatgcttattgcaccattgtaaatttgaaaaatcattactttgagccctcattaaattgggaccttccatatgtctgtgcagtccactttgatccaatctcttcaggccttttttttctttgagacggagtgtcactctgtcgccaggctagagtgcagtggtgcgatcttggctcactgcagcttctgcctcatgggttcaagcgattctcctgcctcagcctccggagtagctgggactacaagygcacgccaccacagccagctratttctgtatttttagtagagatagtttcaccatgttggccaggatgatcttggtctcttgaccttgtgattcacctgccttagcctccccaagtgttgggattacaggcgtgagccaccgtgcccagccctgccttttttttttttttttttttttttgagacagagcctcactctgtcgcccaggctggagtgcagtggtgtgatctcagctcactgcagtctccacctcccaggttgaagcagttctggtttagatttcctgagtagctggtactacaggtgcacgtcaccatgcctggctaatttttgttttagtagagatggggttttaccatattggtcaggctggtctcaaacttctgacctcaggtgatccacccaccttggcctcccaaagtgttgaaattacaggtgtgagccactgcgcttggcctaaaggacattttgggaaccggtgttaatgtctattgaaaccttttatttttggaatatcagattttgaaagataaattgaccattggaggttatatgttacataggtttgggaatttcctgtttctagtttgctgctaaaccagaactctgaagtctcaatgtttttttttaagccgataggaaagagagattttcattctgaatctttgtttttcacagttgaggcttacgagtagtcatcttgttatttttaaaacacttcatagtgcggtttgcgcttgtctgacagaatggttgggttggctcaatactttgatatttttctttttcgtctttgccgtagtattttttttttaagttatgcatctaaatcaagacagaatcacatttctttgcccyaaaacccttttgcctagaattatgttctttggaaaccctagcgtttgaaataagttgctactgtggtaagggtaaatttaattttcagaaaaaagctgttctgacttatttttcttccccatttagtttttccatggtttggactggatatcggtggaactctggtcaagctggtatattttgaacccaaagacatcrctgctgaagaagaagaggaagaagtggaaagtcttaaaagcattcggaagtacctgacctccaatgtggcttatgggtctacaggcattygggacgtgcacctcgagctgaaggacctgactctgtgtggaygcaaaggcaatstgcactttataygctttcccactcatgacatgcctgcttttattcaaatgggcagagataaaaacttctcgagtctccacactgtcttttgtgccactggaggtggagcgtacaaatttgagcaggattttctcacagtatgcattttttagcttatatacaatttatggtaatttgattgttaaaaataatgccagtagcaagtggtgaaataatttccatctctaatggaacttgaattttcttgagtcaaatgaagattaaaggtacgctagtgataggagttggccatctagaggtggttgtctagttcagatgtatggacgacaatcagarccactaaaagggtagcattttattgctcctttagtatgaaaaattagggcatctgctatacgttgaggaagaaactacctaaaaggaacatcattagatcatgaacaatgagattgaaatataattaaaatcatttcatgtcataaaattgttttcagtcttgtctaccacataatttctcttgtctccctcagttgtttgctggcatgttcactaactgaaaaaaataaggaactctggtcaaaagtggtgttttcaggctcagggctggtctgagatgggtgactgcagagccctcctctcccagaatgctttctgatgtgttctgtgctgcacacttaactggagtctcgccaccatgtctggcccctggggaatgctgccaggcgctctatcttgctttcattgagtgaacactggagaacattgtgagcaagaccttgaggctaggtcctttcagggtggatggtgggggtaggccggagaactgacaaatgaataagccaagatcctgaccgtcagggtgcaatacagattgaaaatgtcttcagtgactgactgtttttctgttgctaaatgagagaatattagtctgaaagagattctgcctttttgttttgttttgttttcttgagatggagttttgttcttgttcccaggctggaatgcaatggctcaacacaacctccacctctcgggttcaagcgattctcctgcttcagcctcccaagtagctgggattacaggcatgtgccaccacgcccggctaattttgtatttttagtagagacagggtttctccatgttggtcaggctggtctcgawttcctgatctcaggtgatctgcctgcttcagcctcccaaagtgctgggattacaggggtgagtcaccttgcccggcccagattctgcctgttattctgcatgtcttttagtagagatggggtttcaccatgttgtccaggctggtctggaacacctgacctcaagtgatctgcctgcctcggcctcccaaagtgttggaattacaggtgtgagccaccgttcctggcctcaactttttgactaacatgycttggagttcttcccacttcagaacataaagatcctcttcatttttgttttgttttgagacggagtctcgccctgtcacctaggttggagtgcagtggtgtcatctcagctcactgcaacctctgcctcctgggttcaagagattctcctgcctcagcctcccgagtagctgggtttacaggcgtgcaccaccatacccagctaatttttttttttatctttagtagagactgggtttcaccatgttggccaggctgatcttgaactcctgaccttgtgatccacctgtctcagcctcccaaagtgctrggattayaggcgtgagccaccgtgcccggccgatcctcttcatttttagttgctatacagtgctccataatacgaataataatttagtcattcctttattatttaaatggaattaattgattatgaaacagttcaaattttgactgctaaaattcccctccctcccaagaggctgtagctagtttagatagtgaaaaaaatcttaccttctaactggatactttcagccttttggcttcagtttgttaaataatgtgtggcctcttttgatactgctccaaagccttgagatggtcctctgtcacagtccttgtggctcccaccctgtgtcacaaggtggtttctgatagtgctgtggcctgagcttggtatcagccccattgtccctgtaagcagagatctgaatttctgtttgaaggttgataaatgctgtggttttttttttttgttttttttgttttttttttggtcacacttattcagctgctgcagtagtttctatgtagagtgtatttgggtctgtagtagcaggagtctgtctcagcactgtgtccctaggtttgctcctaaatctgttctgtaaagcatgcacaaataatacacatctgtgagtgcactttcatggttgtttcacgtagtggggatgccttattgaatggaatttttgtttctgttggcttattaaaaagtctgagtacattcttatttcattacagataggtgatcttcagctttgcaaactggatgaactagattgcttgatcwaaggaattttatacattgacycagtcggattcartggacggtcacagtgctattactttgaaaaccctgctgattctgaaaagtgtcagaagttaccatttgatttgaaaaatccgtatcctctgcttctggtgaacattggctcaggggttagcatcttagcagtatattccaaagataattacaaacgggtcacaggtactaggtaagttgtatataaaactcactgtttattcttagtatcctaacgggctgagttttcaggtattacatgtaactacaccttcaagaacctgttaggtgaaagtgtttctggattatgcaaacaaatgtttctctttgaaaattctgattttatgacctagttttctttaatctctactgttcaagatttattatcctaggtgtttcttaaaagatcacatcagcagactcattgtagcctttgccctcagatagtttatggtgtgcatacacaaagtagctaaagttattaggcagcatctgtaaggagaaggcacgggaaaggacctagctctgaaacctgtgtaaatttcatgcttccacacacaygtgtgtgtagaataatgatgtattctatgtatgtgatttagaagttgataygtactgatcagtagaaaaattattgagggaaggtagtatgaaaagagaggattagccgggcgtggtggctcatgcctgtaatcccagcactttgggaggctggggcgggtggatcatgaggtcaggagttcaagaccagcctggccaacatggtgaaaccccatctctactaaaaatacaaaaattagccgggcgcagtggcaggcgcctgtgaatcccagctactcgggaggctgaggtgggagaattgcttgaattcagagggtggaggttgcagtaagccgagattatgccactgcactccagcctgggtgacagagtgagactccgtctcaaaaaaaaaagaaaagagagtattagggccaggcacggcagcttatgcctgtaatcccagcactttgggaggccgaggcgggtggatcaccagaggtcgggagttcgagaccagcctggccaacatggagaaaccccatctctactaaaaatacaaaattagccgggcgtggtggcacatgcctgtaatcccatatacttgggaggctgaggcagaaaaatcacttgaaccaggaggcaaaggttgcggtgagccgagatcgtgccattgtactctagcctgggcaaaaagagctaaactccatctcaaaaaaaaaaaatgaggattagatggaagaagagaatgtttcggcttaagggtcagaggtcacttcaggaaaaacaggcatctagggattgggataaacaatttttttaaaaaaacagttgtgatttaaatagaggagtaatttttttgtgacaaaacacgttgcaggaggagtatgtttgggggtgtactgataagccagggtgacaaggtgcttggatgagaatgactcagggaatgtacttggagaagggaaagggaggaggtgttagcatggccccaggcgtgtcaggctaatttgcacctgaggctcttcatacttggcagacagccagactgcactggggacrtgggccctgtgttttgtactttgcatgttggctcacatgcatatgtaccttaaaggtgtatatcaggcaccttatcttttcacagacttgtttcctaccagtggcatttgcatgattgggttggatatgtgaatatggttttggggttcataaatgttaacttcttgttcttatttttaaaaatgttataatactgtgttaattgtttttaatcatagtcttggaggaggaactttttttggtctctgctgtcttcttactggctgtaccacttttgaagaagctcttgaaatggcatctcgtggagatagcaccaaagtggataaactagtaygagatatttatggaggggactatgagaggtttggactgccaggctgggctgtggcttcaaggtaagggggcatgtgtgttctaagaaatacaggcgggccgggcgcggtggctcatgcctttaatcccaaaactttgagaggccgagatgggcagatcatgaggtcaggagtttgagaccagcctggccaacatagtgtaaccctgtctctactaaaaatacaaaaattagctaggcatggtggtgcgcgcctgtagacccaggtacttgggaggctgaggcaggagaatcacttgaaccctggaggtggagggtgcggtgagctccagcctaggtaacggagtgagactctgtctcaaaaaaaaaaaaaaaaaaaaaaaagacataaaataataatattgggcatattttttaaaaaagctctattgagatataatttacgtactataaagtcagctgtttgaagcgtacaatttagtggtttctagtatatttacaggattgtgcaaccatcactgtaatcccaattttaggacatttttatcatcctagaaagaaaccttgtgttcattagctacgactctccattccccccacagcccctgccaaacagtaatttattttcwmtgtaggtttgcctcttctgaacatttcatataagtggtatcatacagtatatgatcttttgtgattacttcttcatatagcatatgttttcaaacattcacattacagtgtgaatcagtactttattcctttttattgccaaataatatttcttttttctgagacggcgttttactctttttgcccaggctggagtgcaatggcgtgatctcggctcaccacaacccccacctcccaggttcaagcaattctcctgcctcagcctcctgagtagctgggattacaggcatgcgccaccaagcctggctaattttgtattttttagtagggaaaggatttctccatgttggccgggcaggtctcgaactcaggtgatctgccgcctcagcctcccaaagtgctaggattacaggtgtgagccaccgcgcccggctgccacataatatttcattacgtggataatactacattttatccatttattggttgatgaacatttgggttgtttccattttttggttataatgttgaacatttatatgtaagtctttgtatgtatgcacacacacacacacacmtatatatatatatatwtwtttttttttttttgagacggagtcttggtctgtcgcccaggctggagtgcagtggcgtgatctcggctcactgcaagctctagctcctgggttcatgccattcttctgcttcagccttccaagtagctgggactacaggtgccygccaccacgcccggctattttttttgtatttttagcagagatggggtttcactatgttggccaggatggtctcgatctgctgacctcatgatccgcccgccttggcctcccaaagtgctgggattacaggcgtgagccactgcgcccggcctgcacatatatttctaattctattgggtatatacctgagagtagaattgctgagtcatatggtcacttaatgtttaatcttttgaggaactgctacactgttttccaaagtggcagtcccattttacaatcttagcagtttatgagcgtttatatttcttgtcaacatttgttattatctgtcttcttggttttagttgtcttaataggagtgaagtgatatcttgtagcgtttttattttttaagaggcagggtctcgccctgttgcccacatgagagtgcagtgttgcgatcataactggctgcagcctgtgtctcctgggctcaggtgtttctcctgcctcagtctcctgagtcactaggactacagctgtgcrctgccttgcctaattttttttttgtagagatagggtcttgctatgttgcctaggctgtcctggcctcaagtgatcctcccaccttggcttcccaacatgttgggattacaggtgtgagccatcactcctggctgaacattttttttgtgtgtgtggcagggtctctctctgttgcccaggctggagtgcagtgacaccatcttatctcactgaaacctctacctcctgggttttagtgattcttctgcttcacctcgcaagtagctgggattacaggcacacctgtaaattatgccaacatgcctggctaatttctgtaattttagtagagatggggtttggccatgttggccaggctggtctcgagctcctgacctcaagtgatccacccaccttggcctcccaaagtgctgggattacaggtgtgagccactgtgcccagcccgaacatcttttcatgtgtttactggccatctgtctgtagtctttggataaatgtctgctgaagtctattgctaagtttttagttggattgtctttttattattgagttctggatacaagtcccttattagatacataattcgcaaatgttttgtcccattttgttagttgtcttttcacttccttgatggtgtcctttgcagcatggaaattttaaattttgatgaagttaatcttatctatcttctgtcacttgtgcttttggtgttatgtgtaagaaatctaagatcatgaagaattgcctaatttaagatcatgaagaattgtttattttcttttaagagttttatagttttagctcatatatatatatgtgtgtgtgtgtatttttttctttttttcttttttgagatggagtcttgctctgtcaccaggctggagtgcagtggtgcgatctcggctcactgcaacctccacctcccgggttcaagcgattctcctgcctcagcctcctgagtagctgggactacagtgcgtgcygccacacccagctaatttttgtatttttagtagagacagggtttcaccatattgtccaggatggtctcgatctcttgacctcgtgatccgcccaccttggcctcccaaagtgctgggattacaggcgtgagccaccacgcccgccagttttagctcttatatttagctcttatatttgatccattttgagtaagtttttgtgtatggtgtgaggtagagctccaagttcatttctttttgcgtgtggatatccagttgtcctagtaccatttgttgaaaagatgattctttccctgttaaattctcttggcccctttgtcaaaaattagttgaccatagatgtttgggtttaytcctggactcttaagttatgttccattgatatatatgtctgtttttataccagtaccatactgccttgatactgtagcgttgtattaagttctgaagtaagaaagtgtgagtcatccaacttgttcttttttcgagattattttggctattctgggtaccttgagaatatgaattgtagggttaacttggcaaggtctgtaaataagacaactgggattttaatagagattacattgaatcttttggccatcctaatacaaagtcttctgatccaaaaagatggaatgtctttccattgatttagatctttgctttctttcagcagtgttttgtagattttattgtacaggtgttaatacttttgttagatatatccgtaagtgttttattctctaatgctattataaatgaaatcattgtctccattttgagatcgtttagaagtacaattgtttttcgtatattggggcacatggcttttactaatagaaaaatcatatgtatacatgcttgtttactaagttttaggcacttggtcaatgctgttgattttctgtttgtaaaatttgctcgttggtcatcacttccttttctgattggaaaattattgtagcagttctgctgagcatgtactttgaagtactttatcttctagggaaacctgaaattcttaagcagctcactctgggactcagctgtctgtgctttactctgctctgatagagcagtttaccagatgtgcatgtggccatctgagtggaacagctgtgcagttgagatgaattgctgttagaggtgttgtcctggaactgtctggttgcaggagcaatggtgccttccagtgcatctgatgagattctaactgaatatgtgaatatctggtatccaagctagatttcagtagaaaccgcagggaaagctgtctgctcatttagaatgttggagggctctgtttgaagtttgcatttctctttgaacagatgctccattgcaaaataaaaggtttgaagatttcaacaatgttgccctaaaagctaattttatttcaataaagtaacattcaagttctgttgggctttgttgctgttggtttagcaatgggattttttttcccccatcacagctttggaaacatgatgagcaaggagaagcgagaggctgtcagtaaagaggacctggccagagcgactttgatcaccatcaccaacaacattggctcaatagcaagaatgtgtgcccttaatgaagtaaggggacatggatttctttaattgctctaaggaaaatactgaacttaagtgggccccatcacgtctgttttctcagaacagtgcctaaatgtagtcatttggggtggggtttgttttagcacgaagttaaaactcttcaaatacagattaatcttcttttttttttttttaaactgaagataaacattgctacttgtctagaggtaaaatgacatcttttgaggagaaagtagaggaagagtggaaggtagccagtgttccagatattggggactgttgggggtgatgatggataacgatgctgaatgtagactccacactcactgctgagctctagaggccctagggaggaatccagaggaagtcacggaagctgggagaagactgagcaggccgaggggtgccctccttggctcccccacctcagcagagctgcgtctttgtgctttcagcttctttacagtgctgccttgtagcattcaggtcaagcagcattgtacagggctatgaaagaaccaagaatgggctgcccttgggaaaagaggatctaggatccagttggtgcagcttatggcttgtccctgtgtgtatagttgttaaattattcttttatttttatttttaagaagttattctttagataataataggcatgtagcttaaaaggaaacctcaaaagacacaaaggatttgtctcattttaaattaaaaaaatactgtatcagcatcaagtaattaaacatttgttggaatatcataacttcttttttctttattgtatgttccctttcctgtgcttacgtattttcagaaattttagttggtgtgcataccacaatttgtattttatacttaaatatacatttcatggttgtatatttatttgatcaagttcttttatatcaaataacagagcttggcatttggttgcttgctcataactcggcagtaagcatttttaagcatgaagttattctttggttgaattttattcttgatatggggcttaggagtgagatttctggtctacagaaatgatcatgctcatgaattttgacatttatcgtcatgatgctttgcacaagggctgcaccaatttagatcatctttagcggtgaatgagtggattaattttactacaactactgatggtggtggtggaatttcagttgcttttttttgcgaggttaataggtctaaaattttacttttgtttgatgactagtggtttgaatttttcgctgcctgttatattgcttgtatactttgcctgtttgtgtcactgtccttttggattggagtcatactgtttttttttgtttattttaacttatctgtataaaacattgtattcaaaactagttattgttggtcagatttaatacaaatgtttttcctaatctgttttcytctcctgtgacattatctagcatgctttgcagtgggtccagagttgtctggggatcaagtttaagtagccctggaccaactggactaaatttgatcagcagtcaaattgttgctaagagctatgcacatggtgctgtatttggggtagcttttatgagaaaatagaaattaagatgaaaactaattgcctttttttggtgtgctcagaacattaaccaggtggtatttgttggaaatttcttgagaattaatacgatcgccatgcggcttttggcatatgctttggattattggtccaaggggcagttgaaagcacttttttcggaacacgaggtaagctgacttgttcgttgtggtatattatgtacacagagggcttgtgggtcacactgtcatggaacttgaggtagagggtggaggtgaaatgggctgcagtgtttcttttgttttttgtttttttgagacggagtctcgctctgtcacctaggttggagtgcgtggcacagtcttggggctcactgcagcctccrcctcctgggttcaagcagtcctcccacctcagtctcttaagtagctgggattacaagtgtgcgcccccacaccctgctaatttttgtactttcagtagaaatggggtttcaccatgttggccaagctggtctggtctcaaactcctgaccttaagtgatctgccagcctcagcctcccaaagttccaggattacaggtgtgaaccactgtgcctgaacttttttggtagtttaatttcgtaacatttgaaagctgtttcttccctgatactaatgcaaggtaaattttgggttaatttaattgtaagcttaaggaattttagagaaaaacccttgaacattcccctatatttctgatgccatatttttgtctgaactatcctctatattttttctattgcactgactgtgtcattactctgggttctggttttttcatttttttcagtgccagtttttatatattgttgtaattcttgtgccagttatttaagatgcatgttgtaaaaatgaatagatgagtaaacctctcagactagaaccatactatcataagaacttaagtacaattgtagacaggctggaaatgatgaaatggaaaagaatcaaattgctcaacctcatagcctgtcttggaaagcactcttatttttcctatttggggaaaaagaagcagaggtatggaaaggcgtgtaggggttctttcttcccttcttggttgtggggcagttgaactattctttcaactgttcttggattttagatactgttattatgaacatttttcagaattgtattgcatatttagtttaacagtctatatgaattaaaggaaatcaaagtccagataatagcacagatttgaagtgctagagattactttttcctttaaagttactttaagtttttctttttaaattgctttagttcatagttgaagtccaaagtacacaaatccccatatcaaaaagcttaaaattgaagtcatctaacttagttttaaaattctaacattactgtatttgtaaaccagcaccgaattgccattaagtttcttacagttcatgtttctgtatacatctttttttgtgatctgacttattttattttgctttatattagaattttttaaactcgaatgttagatctttttctgctttatttctgcctcttgtttaaccttttcctaggtagaacatggagattagttttttaagttaaccttaaaaaaaaaataggctgggtgcggtggctcacgtctgtaatcccagcactttgggaggctgagatgggcagatcacctaaggtcaggagaccagcctggccaaccatggtcaatgtggcaaaaccctgtctctactaaaaatacaaaaattagctgggcgcaatggcgggcgcctataatccccagctactcgggaggctgagacaggagaatctcttgaatctgggaggyggaggttgcagtgagctgagatcgcaccactgtactacagcctgggcaacagaacgagactctgtctcaaaaacaaaaacaaacaacaacaacaaaacaaacaaaaacaccaaacaggccaggtgcagckgctcacgcctgtaatcccagcactttgggaggccgaggtgggcggatcatgaggtcaggagttcaagaccagcctgaccaacatggagaagccctgtctctacaaaaaatacaaaaattagctggacgtggtggcacatacctgtaatcccagctacttgggaggctgaggtgggaaaatctcttgaacccgggaggcagaggttgcggtgagccgagatcgcaccactgcactccagcctgggcaacaagagcgaaactccatctcaaaacaaaaaacaaaacaccaaaccgatatcatcataatagttataagccttcgtgaaattcttggttgcattttgtccttattgctcgctgactttgtttttcccactgcttagctttgctggtccatttgtccctgtgttttccatttgcattcaggcctttgactcttgtgtgcatctctgcccttgtggaactttgatgattattttattttatttttttatttaagttctaggatacatgtgcacaacgcgcaggtttgttacatacgtatacatgtgccatgttggtgtgctgcacccattaactcgtcatttacattaagtatatctcctaatgctatccctcccccctccccccaccccatggcaggccctggtgtgggatgttccccttcctgtgtccaagtgttctcattgttcagttcagaactttgattattttagcctctctgagccttgaaatattttcttgccctcacattgaagtcactttaacttttgttgtgaaagcttcgtatagattctctcaagcgtttcctctttgatcctttattctcatcttagcacgttgtagtttataaccacctgtttctgtcttgatagtagcatcctagtcttcagtggaccccccccatatatatatataatggttaactgtatcttctatatttttattataaaataaaaggtacagaaagctgcctaaaacaaactgtatagtgaactattaagacaaacagccttgcctctgtatttcagctgtgccttgtcctgtagctgctggccgcctcacatcacagattggtgtggctgcctttattttatttatacacaccaaaaccaaagatggtcaatatgcctttcttttttttgttttttgagatggggtcttactctgtcagccaggctggagtgcagtggcgcagtctcggctcactttaacttctgcctcctgggttcaagtgattctcttgtctaagcctcctgagtagatgggactacaggcacgtgccaccgcacctggctaatttttgtatttttagtagagacacggggtttgccatattggccaggctggtcttgagctccagacctcaagtgatccacctgccttggcctcccgaagtgctgggttacctgtgagccactgcgcccagccaatatgcctttcttttaaattgccaactagagtgtgacaagaaagcctttggcctctcgtttgatcaggtttcttgaagaagcttttcgtgaaagatagagtggtagttatttatgtttcagagacttttaaaaaatccatacacaagtctttcaggatcttctcattccttttttagttatttctttwaaaaagtagtctgatatcttaccttacaggttggagaccctgatggattctgcatcgttttaggatttgcctctgattcttgctagtgttctcttttctgtcattatggggtttgccccgttttctctaatgtgctattcctgtgttttggttttgagttcttggttgcatgtgacctgactgcttctggagacagtacagtgcttgtcgtctctcagctgctgcttctgtgtctcaggagggctgagggctgccctccctcgggagcctccgtgcttcctcaggctttgctctttgttctgtacctctcttcacgttacctttgggtggtggttttcattcctgtgccgcctgcttctgggccagtgatccaggtgtctggtgaccacccgggcacagctgcttggctgctgtgggcacctcagcttcccatgtcctgtagggaactcacccaccggccttgctctccacacctcttactcctgtgtcccctttctcggggatgctgccccctcctgctgtcctgtcctctgttaggggtgaatcttgaatccatcttatctcttactctccctccctctcccagctcagtcgggctctcaccctctgtgacccacctcacaacttcacctgtttcattgcactttgcatccgacctcgccttcattccttagttgtctggaaatgctccaggcctctgctgcttctcacctcattccccagaaacagtcaggttctgtctcttaccagaggtaactgagctgctgctggcctcatagctcctgtcgccctcactgcgggtttggttttcctcttatcacagtggtctgaagtgcttggatagtctaggacatccagccccctccccagacagggactccttagggcgtctctgctcccaggctggccttggcccttctggggtgctcaggaaatgggtatgctgtgtgtgggcagtggttggctttaacactagtcatcatgtgtaaggtgatttgaataagtctaaggaaaattgcacttatttttggtgtattttctttcagggttattttggagctgttggagcactccttgagctgttgaagatcccgtgatcattacctggggaggggttcctgaaaccttccacaatgggatctgtggactttcatttttttaagagacttactcaatttcatgactgtactacctgaaacaaagtgagaaaggacaggtgtatttttctaagtcatcaagataaatccttaagaattcagtctaaattagcaaccaggaaggaaaaatatattaaaaacaacaaaaaagtggcacatgtccaggcagtgtgaggatttgctgtatataagttgcctgctttgtatttttgaaatctctgcatcactcattggaagtgcttctgaagagagctgctctgtgttcagttgactggttttgtgtcctgtttgaacttgctgaatgtaaggcaggctactatgcgttataatctaatcacaatttgtcaatatggtcttggcaatcatctgtgcattactctggtttgcattaagcctgtgtgtgaacttactgtaaaacatgttttatttcaaggttctgcaaaattaattgggcaggttaattgtgtacctgaaacttaacaagcagtttttggaagggcagttccacgttactttacactaaatcctgggaatgaatgtctggagagacagggcttcttttcttggcagaatttccttgggtagtgggcggactgttctgatgcaagtgggtacactggcagaagcagcacaatctggaggactaacatgagtcagcagggccactagaattgacaccccctcaggggatcagggagaatctggtttttctttcaggctaagtagaaaaggaagaactgaagtgtctgtcaaagaactcatggggagtggggggtccttcagggcactgtggcacttgggaggtgagtctcagaagactgcctgaggagagtgccaggctgcaggtgctcttggtaggggctgaagcttttctttctgctttgcagaataatttcaaaagcctttcccaaggagagaatgcaccttttatatctgaggtcttaagtggtgcccatattgctgttgaaggcaaggatgggcctgtacaaagcagccttggaccaggagggaaaaccccaaggctctgcagcctccctgctcccctccgtttaaggctgtggtcagggagggatgggcagggtgccagccgcatggaggcagcagagacacccgtgttccagctggggcaaggggaactgatatgtgggctgtgggctgttccactaggcgtggccacctctgcacatgggccttggcacttaggaaatatgggtgctgctgcattgggaccttgtgtgggtgcagagcaggatggctgctgcgtggagggtaattttgtcccctggagagtgattggtgaccctcttccctgctgctgctgtttgcaggctcctggcctatactacctctgacgccctgatcctgagttcctctgccctcctctgctgccagcagcgctgttggtggcctcaccctcctccagtacccaggcaccaaagatggcaccaccatcctcctgcttgtaccacagggtgctgctccctgggccaactcctgtgaacttgctcacttcccatggagaccgaggccagggcctgcccctctgaggcccctgttttgtggtcctgctgcctctgctgtgctgcgttcaggaggttgtccactgctcgacgtgggtcaccatgcagcccttgctgttcccacaatttaacagaaaaggaaactgaacggatgagtaaggctgcccagggtcactcagctggaaaagagtagagctggactcaaacccgggactgtctgtctctggtgcctgagttgggaagacgctgttgatgtccccttctgcctcgctttgagcttcctcctccgtgggccctccccctactctagagaaactagtccattccctcatgttccaccttgtgctcagtaaaccctgtcactccacagcagggtttttgagacagtctcgctgtgtcacccaggtggagtgcagtggkgcgatctcagctcactgcaacctctgccttccaggctcaagcaattctcctgccttagcctcctgcgtagctgagactacaggcatgtgccaccatggctggctaatttttatatttttagtagagatggggtttcaccatgatggccaggctggtctcgaactccagaccccaggtgatccgcctgccttggcctcccaaagtgctgggaatacaggtgtgagcccctgcgcccggctcacagcagggttcttgataggccaccagtgaatcccatgccaccgaatctggcattcatttcacagcctcatctcagttctcactcagcagagccctcttgcctgtcctgccacccaggctactaatgttctggttcattctctgctgacagttagctgtggctgtcctcagcctcagtcctgggtctccccaagcagtcattagcatcaccttgactgatttccagggaacacttcaaccaccccttacctctgagctccagccccgagacactgccttctctctgcatttgttgatctctgtgcagcagtgcccacatcctcatcccagcttactgccgtctcaccaccttcaggttgtgaggtgcccataaactctgctgttaccattgccacttccctgtcttagcagctgtccctttcagtctgccctccactagtggccatgaagggggctgtgaccgtggtccaggtgagaaaggaaggcctgaactaagatgggaggtgggtggccagaatggagaggggagaagtggatggccagaatggagagatgcttagagggctgtgttgggaagtggtgactggatacaggggagggaggagagatacaagagggcacctgggctcatttgtggactacgtgattttgagactccaaataagcactgggtatttgggttggagatacagagctgagaatgatatgcatgtaggtgggcaaagcaagggggatttcatgagttctaaggtagggtgagaaaaataaccgagagttgagcagtgacggaggaagctgcaaagaaaacgactgctcagggagaggctggccaggggcctgtggctcaggggactgagaagaggagctctctaggcatctgaattgaggttgcccacaattggttgcaagatcgtggctggccttgatggaagctgggaagccactcggtcctagtgaggggtggtgaggagagcagcaacggccacacaggaaggctttggacgttttttctcctgacactagttatttccaggcctgggatatagctaggggcttggggtgggggcaactctttgcagggtggtgtggcctgtggaggaaacaggctcagttccactactttggccaggtgcaatggctcatgcctgtaatcccagcactttggaaggccaaggcgggtggatcacctgaggtcaggagttcaagaccagcctggacaacatggtgaaaccccgtctctactgaaaatacaaaaataattagccgggaatggtggtgcgtgcctgtaatcccaggtactcgagaggctgaggcagacagttgcttgaacctgggaggcagaggttgctgcagtgagccgagattgctgcactgcactccagcctgggtgacagcaagactgtctcaaaaaaaaaaaaaaaaaaaaaatccgctatttcaggtcaccctggtgctggcgttcacgtggaagactgcttatctgtatccagctgtttgcagagctcagggaggccagggggcttcagactccactgtactctgcattccaggattctctgttctctggctgtggtggcctgacacactcttcaccactgaccccacccccgcttgcacactatgccacaggaagggcaggggcttccatcacaatcactcagtactagttaccagctctgatagaattactcaccttgagtttccaagtcttgctgaaggtgcttgcgtaagtggcacatggatgttccctctgttcaaaggcatatgcacaacactatttttcaaaatttgcttttatttacacgtttgagtcaattacatgcatgttttatttttgaggagtgattagcaaaatgcattaaaattttaaaatagcaattaaatatacaaaaatatagcttacaaaaaactgcgaatgtttaaaaatattctgctgcagaatttttagtgtacaaagacgtctatgaaacctgaggttcagcatttcataaacctttttttgagggagttacacaatacctagtgaggaaacccgagggccaaactacaagacgaaaaagtgccccgttcctggcaatgatgtcagaagaccaagaggcgatagttaccagcaacactctaggaagaccagctgtcaccagaagggagttcctaacacttgccacacctgctcccccgaccgggggcctgggagggaagggcagatggagaggaacggtgtgcagtgggcgtgagatgcagatccaccaggcttgggactggcaaagggagctgagaagagagttcccccaaagcacaaacaagtctgctgacactggtggggcccttacagtcacagaagtaaggactggatggtaagccaaaggtgctgatgcttggtcaaaaagtggagtacatctttgcatcttgtaacaatttgggctctacagctgaattggcaaagtaaggtttactacacaagcccctctttttcttctgatatccccactcaaatggaagcacactccccagcacatggggatcccttattaatctttactaaagaaccgtgaaccagcattttccagttatcaactggatatttaggcatgaatctggacatgtccatctgcttaagaaatctgcttaagaaatctgtaacagctacaggaaaagacacacccagggccagagattctacaaatgccagaagagtggatgtgatagagaattttttctcaagttttgggttagggcaccagttgcaattttaatccaggggaggatctgggctgctgctgtagggggcaagtacaccagggaggtgggtgtggacagaggcactgggcagctgctgggaagcgaggcacaagtctgtgcccctactcccagggctgcctggaggaagcagctctaactttcatcagcggggacaaaaatgaacttaaactaaaaaaattattggccgggcgcagtggctcacgcctgtaatcccagcactttgggaggtcaaggcaggtgcatcacgaggtcaggagatcgagaccatcctggctaacacggtgaaactccgtctgtactaaaaatacaaaaaattagccgagcgtggtggcgggcacctgttgtcccagctcccgaggcgggagaatagcgtgaacctgggaggcggagcttgcagtgggccaagatcgtgccactgcattccagcctgggtgacagagcgagactccgtctcaaaaaaaaaaaaaaaaaaaaaaaaaaaaaaaattgttggggtaatttctgttgtcaaatggaaaacaaggcataaagggaaaattctgtaggaagcattttcttttcttgtgtgtttttttgagacggagtctcgctctgttgcccaggctggagtgcagtggggatcttggctcactgcaacttctgtctcccgggttcaatcaattctcctgtcccagcctcctgagtggctgggattacaggcatgcgtcaccacacccggcaaatttttgtatttttagtagagggggtttcaccatattggtcaggctggtcttgaactcttgacctaaggtgatccgcctgcctcggcctcccaaagtgctgggatgttgggattacaggcgtgagccatcgcgcccgaccagaagcattttcttttcaaagtgtgtgcacagagtgaggaggccagcctgggcaacatagtgagttgagacctgtctctacaaaaaaataattacgaaaattagccaggtgtgctggtgtgcacctgtagacgcagctacagactgaggcgggaggatcacttgagtccaggaagttgaggctgcagtgagctacaatggtgccactgcactccagtctgggtaacaagaccctgtctcaacaacaacgaaaagttgggagggaaagggagtagctccatgaactgacgctggacattcaggcatatccacatgagactcactgtgcacttgctcagtagctaagatgtctgccccacaaaatagaagccttcagttgctgctgctcaaactcctgcatcaaagacacaagagcttgcctaagtgaccacaacagttgcagccacacatcaccactggtcctcacttggaactggccaaggtaggggaggggccagcagctgtccaggcacctgcagaggctgctcagagctgggagaggcctgtgccactgctgtcagctacagagcctgatcttgagcatcctgtcgcagatagaaagtcaatcagaaaaatctggttgtgctcttggattagctgggcatttggggtaagggagggactgcagattctgatttgtacagaaaactaaaatttcag

SEQ ID NO: 95864 - DNA, 67754 bp, Homo sapiens
  misc_feature (1)...(67754): n = A,T,C or G
gaggaggatttgaaagcgctttggccttgtgttatgttttgcttcttttctgtgtcccctgttagcacattgtacttgaattacctcagttttttgtgacctcatgagctttcttaacctctgtatctctttttcggttggggcttggaggaatggggagggtgttcttttctgtttcttgtgtaaattaatagttgtttttatagacttcagctggtcaagaccctccccgtgcccctggagaccagcctcccagctggcaggaactgtgcaggaggagttgatactcaggatctgaatgtgagggccgaggagggcgaagagygtgggtggggaggggatgttgctttggggtctcatggtccccagagggcactagggagtcacttttggctccgctggtgcatgaagtcacctgtggccaccatccgttccgcctaaaacactctggagagaatcccacctttcttacaatttgctgggccattgaggtttgagggcctgtgtttggatccttgcaactgtgtggtctcacctctgtgcgtgcattctcattgccagaattggtctattttcacggctggtctttggggaggggggcgggatccagcctttgttttgttgtgttggggtgggggtgttgtttttctaaaagctacctcttatgtttgtccagttgttcttttgttcctttcccgcctcccattctgctgctcttcctccctcttttccccaacctcccccgaccctcctgaattttggaaagcacatttgcaatattcgtgtttgctttgggacggaccctccgtttcatctcatgctttatgtgtaagagttttttattattattttttctttcctttctctctctgagaaagttgtggctgcgttttgatcttaggttttacaaagtggtttagggaagcggttttggggagaaggatcacgaggaatgtagggaagccggagggatgggtgctgctgcgacgacccccccgtccctcggccccagccctcctgccctccccgtcaatctcatccaccaaatctgaaggccttaaaattgtgtgttgggaggatgtgaattgggaggacggtgtcactagactgtggattagggatggtaaagtagggaggatgctattttgcaactatagtaacgacttagtgttttggaaaggaaaagragttaaacttgaaatacgtgactagaacagttgtcatgtttataatgtgaaaagggtgaaatcatttgggggaggggccgtctgtaagaaatcattatgcactatggcttcctcctctggtctgggaagaagcggggactggctggccctcaggggatctgtaaatcccagaaaacagtatttttaacagcaagatgtcattcaacattggtggggaaggaagagaaaaaaatcaaactattccatagaactagctggccccctcactcccatgcccttcccactcagcctgggcccctccccgctccattcataaaagctgagagggttgagctaatcttcacaaattgtaatatttttgtagtatctgttagttccttcgtcagttctgcagaaccttgccctttccttttgtaatgtgaataggaagacaaaagacaaaaaaaaatccaccaccaccaaaatatccctttgtacatgtatgtgcgtgtgcgcgtgtgctttgtgtgtgtggttgtgtgttaaatcatgcagtattgtcgtaatctggtgttgcagcaatggatggtactaaatcagcacctggatgccccacccaaccccgtgggccctgcagaccccagtagggaggtatggggagagctcaggggagtgtggtttctgagggctactgtctggggacacctctgaacttactgtaccttcctctccccatgaagacacctgaatagagtctaacatgcctcttctccaacttcctacctacaacaacagaacagttctaatgttgcacggcctagtggccagggggcaagctaagaggctgtctggaggctttatatgtgtctggagttaaggggagaggaggagggtagacaggggtctctccccaggtgggatctgaatatctgtcctcccctcttcttcatgccacctgactccttcggccccctggctgcctttagctgtggtactgctgacaaccctgcttgctactgccttatccagcacagtgaaaaacttctccagcctggcaaggccacgttggttaatagtccctttcccatgtccagctcctacaaatatgtcccttaatgcatttggtgacatttacacctcactcatgtgctctttccctattcactccttcactcattcaaagcattaaaatcctatgtatatataggatagacaaatatatagatatatagatatatatatatatagcaagagattgatataaaatagtaaatatcattgctgctttgggctgctttggaggaggaggccatgaatatggggaaggcagatctggggtgcaggggtaggtagggaggctgggggacccagtgattcagtacaatccaagggatgcaacgcgggcttgtttaatctttgtgcctgaacagtttttccatgttgagaaaaaaaagaaaaaaaaactgctgcaatttttcacaagtgtatggtacctttctggatgctattggtacaattgctgtggatggaagagggccattgagcttacctccctataggggagagagcagaggtggggcagcctttcgactctgtccatgacggctggcagggtcagggtagtttctgggcctgcttcccggcaagccgagctagggtgaaaactgggggcgcaccaggatgtgagacagaaaagcagaagatgagactctgttcattcacttttcctaggcccatcctgtggtcatctttccccctcccatcatacctcctccttcctggagcctctgccggcttggctgtaatggtggcacttacctggatatttcagtgggaggatgaaaggcgagactcaccctacgcggtgggacagatggggagaggaaaaaggcagagatggccaggagaggggtgcaggacaaaccagagaggttgggtcaggggaaaagggtggggagaaagaggggtgcaggccctgcaggccggttagccagcagctgcggcctccccgggcccttggcatccaacttcgcagacagggtaccagcctcctggtgtgtatcataggatttgttcacatagtgttatgcatgatcttcgtaaggttaagaagccgtggtggtgcaccatgacatccaacccgtatatataaagataaatatatatatatatgtatgtaaattatagcactgagggccctgctgccctgctggaccaagcaaaactaagccttttggtttgggtattatgtttcgttttgttatttgtttgtttttgtggcttgtcttatgtcgtgatagcacaagtgccagtcggattgctctgtattacagaatagtgtttttaattcatcaatgttctagttaatgtctacctcagcacctcctcttagcctaattttaggaggttgcccaattttgtttcttcaattttactggttacttttttgtacaaatcaatctctttctctctttctctcctccccacctctcacccttgccctctccatctccctctcccgccctcccctcctccctctggctccccgtctcatttctgtccactccattctctctccctctctcctgcctcctgctgccccctccccagcccacttccccgagttgtgcttgccgctccttatctgttctagttccgaagcagtttcactcgaagttgtgcagtcctggttgcagctttccgcatctgccttcgtttcgtgtagattgacgcgtttctttgtaatttcagtgtttctgacaagatttaaaaaaaaaaaaaggaaaaaaaaagaaaaaatgaatttactgctgcaggtttttttctctctccatgtgtcactaagtgaagtttgtgccttctatagcaaagagaatattttttacatcctactaacagtagatttttttgtagtgaacattttttgtatttttatttataagtctcataagaaaaatagcaatgttcagttgtataccttgaatctgcagttagaagagaataaagttaattcagttgtctctcgcttgaagcgtcccacctttttattgaagtacttggttttgttttgtttttttttttgttttttttgccttttcttgtgtggggaacatggtagaggaattaagatttttgtgtggggactgggaaaaagaaagctctgtattacacatatttagacttatctatgtgtcacttttatgccacatttacaaggcacagatgcactgaataacatttttctaatactttttagttaaaaaatgttaaatacgttaatatcgtatgatccttggtacaatgtgctaggtaggcacttgttcacttattcagcaagaccaccatgtaccagttactgttgtcggcgctgggaattacagcaaaggacaaacagacaaaccctggccgccctggggctaccatgctagcgggccgctgagtcggaatccgtggctgtgttaggataacttgctcaggattgcacggctggtgagcagcagtcagaactccatccacctctcctgataccaggccaggttcctttactccagagttctcaaagcaggggtctcacgtcttctttagtctttagagagacattttcaactgactccttagtggctaagcaagcttcagaaatttctcaacaagaagcttccacacaatcaaaggtccctgcctgcgtctgtagcagccaagagctgttaagaaaggagattggagcaggtggccttgtgcaggggaggggatgggtgggaggtggccgtgcaagctctgcattgtcatggacggaataaaggatttccacaacactcaatgggtacgattccctccctgtctcatctccctgtgtctgggccaagccctcttctctggccctttccccgttcctcttatcggggatagaagcatcgccctatctttagctgtaaaaccaaagccactcaatcctagacgtggtgcttcagcacctctgcctgaggccgtcctcactgcctgtctctgaccaaaataacccctctcctcctcaagacccaggggacacagccatgattgtcgtgctgggtcactccggtagggtaaacccacaccgagcatcaggcctggcctccagcatcaccaggagtcgcagggagccatcaccccacgcgccaccgccacccacctggggagccaaacaaggcctggcctgccaggggtggcactgggagggttacctttcagccctgttctcctggggccaagacccgggtctgtctgaccctggggttgctgagcagaaaccgcctggagctacccctaccaccggacaatcttcccaggaggaggaacaggtgcagcctgggggcctccagcccctagaagttgcttctctgtctttgctttctcctctccctctttgccgtctgctgtgctttcttgacccctcctgcccctcatctttttcctctctcccaatcttttttctctcctttccactcctcccctctcttcctcatctgtggtcttttctcctttctttttgcttttgtttctctgtcccaccttattttccctctccacatatttctcatctgggaaaccagtccttaaccaaattctgtgttttgattttgagcagttgccaccattcccccaagccgtcctgatcctggcttttcttgggcccctgcctatttcctcacccccacactctactccaactccccgacacacacacacagacacacacacacagcctcctcgcccctcccccagctcccctcccctccctcagscctcagctttctcttgacagatgggagggcagtgagcactccctctttaaaacaacatttaatcgccgttttctgttcttggacatcaaagctggggcttaggcgctgtgctggggtcgcggcggcgcgggcgctgggggagaggaggtgagtgaataggggctgggctgaatgggctttgtgtgaccgccagctctgccagctttacatgctctttgacccagatatgatctcatggagagaaaggggccctggccaggccagcctgagaatgctccctccgtggcstgactcaacccctctcctccctgcctggggcaggcggccccactgccgccccctgccagccccggctgccactgccctctgccccaaccctggcaattgtgggcagcctcctccagaacacactcaccaggagggcacattgctggggtcagaagaggggacaggcaccgaggcaggggctgggaggatgccgccgtggggctgcagggtgttctccagggacctyaagcgggagctccccgcatgccctgtagtcctggctgggttcaaggaggcgtttgggtcatttcagccttagcagctctcctcccagtckctctgaggaactcctctcctgaccaaagtggagagctgaggcccggcgccagcagaggtttgctgaagactcaggcaagttgcagccygtgagaagaggcataagggaagccaaggccaaggccgcctccctccactcagcacggccaggccttcccatgtgggagcccctcacgcccctggcaccaggaagggaggggattggggatctgaagatgactggcctcagtgccctgcttcagcccagaccctctgtcacttccatcctctgctttgcttgctgcccagagcgattttccaaaaatgcaaatagcatcatgtcgctccctagatgagagtccctggtgactcctcagtactctgaggatggaattcaaactccttaacaaagttccaagacaccctgagtgacagagcccctgctcagcacccaacttcgtcttaagatcactcttgagcccctcggccaacccctactctgctccagccgatgggaccacgggtgttctgggccacaccgagctccattcccctgtgggcctgtgcgtgtgctgtttcctcttctgagagctacgcaaacacacacaccccttctgtctggctctctcaacttctcctttttcacttttcagctcaaaccttctctcaggaagccttccctggacccctgaagctaaattaggcatagagtctctatagtaccatttagtcacctgtttccttaactgtcaccattaccagactgtcagttccttgaggtcaggaattgtgtgttatctatctttgtgtttccagagcttcatgctgcctggcacatgataggcacccggtaaatctttgttgtataaatagatgaaagaaagagagggagaaggagggaaacagagaggtaattagcactccagggctcatgttgcagttgtcaggggcacgtgagagcagggaaggaggaacatcacatgcccgctcgggcacctccccaggacacgtgtacacacacgcagaggcccagtgggggggggggagctcctgcatccccacacctgtgctcatgtcgattcatagaccacctgacccgtgtctgccgcatgccagaggaaggagcaggaggcaacagggcagtggtgcttcatagttgggagctgcctgggtgttgctgggcaggrtgcggggcaggagaggggctggggggttgcatatgtagacacctggtccttggcccatgggggcaggtccatcccccagctctctgtgtggtttcaggcccagccccgccgccatccccacttccactcgtgggctggcaggagggcaggctcctctccaggctgcgttttctgcacccagggggtgcctcagtgaaagtgasgctcatttaaacctgactctgccgccctgcagccccctgcagcgctaattaccctgtagttctaaactgattgctgtacactaagcttaagccctcctttatttatttactgactacattaatagcaaagccacgctgcgttcagccgctcccaactgtacaccggctggctgcacccgttccctcatgtcttcccagggaggcagggtggagagatgcagcctggcacaaggcccccttacccaccaccctgactgaatctccagggccagacaacatgagaaatcactgacttcatccatacctactctgggacccgatggggctcctcttattctgactctatgacagagtgggaacatacaacacacaacagctcaccaagcagaggggtctgctattcacagcacactcagaatgctgcctttcagccttcacttgtgggatgagacgctgagcgctggcctcattttacagatgggtaaactgaggctgtggctccatagctggtaggtggtatctcaggcatgctgtccatcgcggagatggccgccccacttgtccccacccagccagctttgacaatttctgttgtgtgttcccataacttctaccccttgccacgagaaaggaagcccttccctatgtggaactgaaactgcttttttgctctcagcttttctgcctcattcacctgcttgtccagaatttgctggcaactttgggaatacagcctttccttcattctcagcctttaccaagcaggtctaagtcagaccttcgatgccaatccccacttccctccagcactcacacatccagggatgtctggggagaggaggcccgctccgrgctccsgtgtggtcaagccctgctggttctcccattctggggtacagaggtgctcataaacactgtccttgcctgcatctctgagtgccctcaaatcccctgaggcagagctgggccctggccttggggcacagcagctctctgaagaccagatgggccccatcagggtgcagcatacggacccacggaaccaagcacccaggctctactctgatgcyaaatagcttggtggctgccgtgcggtgcaccctagaggaagaggggcagctgagatttggcagaatctgggattcagtcgaggggacctgggtttgaggccagctctgctgtgcaccgcgtgaccttcactgtatctcaaaggctcccraaggcctcacttcctcaaccctaagactggggtcagcaaatacctagcccacccatcctcaggacaattgtgaagccaactagwgtaacgacgtgaatcagctttctaaacaccacgatgctataaacgtgagttatcaatggggacaggctctggctggtctggaaggggagctggggtcctagacatttatttccagaacaggagcccacggagccagggacccaggagcctgggattctggagtagtgaggctgctgccggcatctccgggactctgtctccacctagtgggcactgactgcaggtgcttctgctgctaaggccgcctggaaagcaactggggttgcacatccccttaaaagctgccttggggccgggcgcggtggctcacgcctgtaatcccagcactttgggaggccgaggcgggtggatcacctgaagtcgggagtttgagaccagcctggccaacatggagaaaccccatctctactaaaaataaaaataaattagccgggtgtggtggtgcatgcctgtaatcccagctactcgggaggctgaggcaggagaatcgcttgaacccgggagatggaggttgcggtgagccgagatggcgccattgcattccagcctgggcgacaagagcgaaactccatctcaaaacaaacaaacaaacaaacaaacaaaaagctgccttggttcctttgggtcccctgctatcccaggtcagggtagggctgagtaaggagggaatgtggttcagatttgtgccagagaagaaacgctttaaactactcggggttgggggacggtgttccgctgggcctttccagaagtcttcctaagtcaatagttctttcttgacttttcttctcccatccaccaactggccatatcaaatccaactcctcccatccctaaaaagctgagtgggaagctgctgtcagtcagccctaaccccagggatacgcgaggcctcatcttgcactgagggaagatcaacctcagatggaattcagcttctcggaagctttgtgactgggaaagaagcaggcaggcctcgaagggtttgcagaaggagcccagagtgcccctagggctgggtcactgagaccctgggacgtgacagtaaaaggctrcagggcaatgggacaaactcttacttcctgaggtcctgaaccttccgaaagcctagaaaacccataatggagggtcgctgaagtcagctcctgcctttaaatccaactgccctttttaaattttatttttattttttatcttcagcttttaagttcaggggtacatgtgccggatgtgcaggtttgttccataggcaaacatgcgccttggtggtttgcggcacagatcatcccatcacctagttactaagcccagcattccttagctattcttcctcatgctctccctttcacccccaacccaacacaggccccggtgtgtgttgttcccctccacgtgtccatgtgttctcattgttcagctcccacttataagtgagaacatgcggtgtttggttttttgtcgaactgcccttttaatgcagtgagtgagactggtgcctgtcctaaaccctccacaccccactttcagctctcagaaccagttcaccagccaacccctgcacttggcctacagatgatttgactggaagtgatcttaggacaggtcatcttttcactctccttgcctctgtgcgcttccagccatctcaaatggatgcaactaaatggtttggaaaacccctccaacaygaaacttctaggattctaggactctaggactctactatagagccaactataaagatcctcagaaaaacacatacccctggctccctatcacctgtcagcactttttaaagcagcagcatttcactttgttttcccctccacgccgaccagtgtggtcttcagcatagagtgagcttctagtgacacgagctggagggaaagaggaagtgcatcakgacggctcgtccaatggacaaggtaagggaaagatcttccctaataactctccatttgggaaggagggagtcacaaatggcaggggaggtggggacactggccctcaccagctcaacttgaggaatactcaccttactctcagaaatctgtcgattaccattcctccttcacccccatcccaagcatgggtacttgaccttttcctgaattctccacagctgacaccagctgaatgcttttcctgaattctctggcacagctgagaccagcctgggatatttaaattagatttctctgaagtctcaaggatggcaaaagaaaacaagcaccaatgaaactgagtaccccccctgtttctaagagaaaaaaagttaatttttacagttatgattattttctcttttctcttttctcctattccctgcttcctacttagctctttagaaatgattataacctttaccttcccttcaccagacactcccttctgggcaagcttatctgactgtgtgcttacttagcagctccagagctgagctctctcctaccaggagcttgcgtcgagagacagcagtcaattatttacaacctgaagggtgcccattacaaaactctttcccacctgaagagtatctcaaaatcatggccactttataacctagctctgcccacgatggcaccagctcaaccacctggcagataacgcacaaaccacgtagaccccacacctgctcgctccctcccctgtatgccgttcaaattaagtccccctttaaaagtcccgaatttctgccccaaaagtgaagtgctagccttaaaggcagaagcctggacttcctcccctaagctaaactttggaataaagtcagtgtctttataccagacctcttgttagttgaactctacaagtggcaagcaactgaacctccattttggttacaccaagaacagcataacattagatcatctggttcacaggcagcagcatggctcccatatcatgccttcctgcctggttctctgcctgccttcaggagacagggcctgtctttaatccctgccactgacaagcctgataaagtgagacccagagtgacgtgggcttcctgtttctaatggactatgtgtccatcctcttattaaaagtcagckcctcctcttgggctctggatcatatcctctcagtctttccaagccctttgctcctgtgcttgtcttctgtttgctacatccatttccccctctcttcctaattattcacatcagcatagaacacctcccattttagcaaacctttccttgagcccacatccccctttagcttccacccatatttctctcttccttggaagagcaaaattctagagagctgtctgcagacactgtcttccttcctttttcttacaacaatttccaatttgagttttatctctgttattcctttaaaattgtcttttcaagttcactagtggttccaccatgcaaaatgcaatggcttctttgctgatctgaaaatataggattaacaaactcagtttcttcctgccaccctctcacaacatagtcacatgcagcttctgacacctaatgtagggggcttctccccacacaccaagcaagcactcctccagtagctgacaccagctgggtgctctctaactcaattccattccaacactacctacctggagatagcatcagatcccacaggttaagggttcagtcccacaaaagcgcctcccacttccaatgccaatcacaagctccaggttgtttgatccgtgcttctgatgaccagctatatatcagggttcccacaacctcctcattgggtttgattaatttgctagagtggttcactgaacttagggaaacatctacatttacctatttactataaaagatattacaaaggatacagttgaagagatgcatagggcaaagtatgggaaggggcttggcacttccataccctccctgggtgtgccactctccaggaacttccagggatgtggcagtctggaagctctctgaaccctgtccttttgggtttttatggaagcttcattatataggcatgattgattaagttactggccattggaaatcaactcaaccttcagcccctctcccttccctggatgttgcagggtagggttgaaagtcccaaccctctaattctgccttggtctttccagcaaccagcccccatcctgaagctgcctatgggctgccaacccctcagtaaactcattcgcatatgaaaaggcactttttaacataaaatcactttgaagatttcaaggattttaggagttgtgcgccaagagacagggacgaagaccaaatatatatttcacaatatcacagctggctttatcttccttgatctcccaacagctttctacataactgacttgctccttttggaaacacttctggtttcccttccctcactggctgctgcttctcagtcttgttggctcaccccatcatcttcttctgctggagctctggatattagacagtctctgaaaagttccttgatgcttttactttgtctagctacattctcccccaccctgatgtctcatctatttctgttgcttttagrgtgtacctctgggagattattccttaactgttccctggccacgtttgaagtgagtcctgggattgagtctgccttgggacagtgtggctttcaggaccagcccaattcctgcttgtgcaaatctgggagactgagtgtggttttaagctttgagagtcaaagacattatcaggccaggttcatggacttttggcaattcaatttctccgaaaatagcctttggctgtatttgcttccaatcgatttcttacgccagtaacccattaaccatgattaaagttctttcctcaacttagttgtccaatctgttattattattattattattctgcaccgccaagtctccttgtcaacttcctggtggttaccttggggtcatctgcgagtcagcttgggtgggaaaagcaacacctttaatctgatgtttgtcacagtactgagtctctttgtaagagaatttttaataatgagcctttaatgcttgaagccttttccagtttcattcctgtaatttagggtccagaagcaggtagctttcctatatccaagaaaacccaaatttytggattttcctcctacttacattcatttcttctcgggaaattgtcagttattacctgaacacatctcttcatagtaatatcttgctacaaacgctgaggagcaatcaacacgtactaatattatgtcccccaccccacctcgctgtttcccttagagctataggcttagtatatacttggcttagtctaccttttaagtagttgcactcaagagttttcctaaatgttttacttatgcctatcacagggctctttctaactagctatcttgctcttcttctgccagcaaaggctctaaataaacctgccactgtctacctttctgaccgtcttcttccactcttttcccacctctatacccagcctcactgtgattcatttgtttccagaacaggacaggcctttgcatgtgctgttcccactgccaagagctccttgcccacccccacccccagtcccaccccatatctttgcatggctgcctccttcacatataatttgggtcttagctcaaatattgcctctcagtggggtcttacctgaccatctgctatggtttgaatgtgtcccccagaagtttatgtgttggaaacttaattcctctgccctcttgaatggattaatattatcatgggagtaggtttcttaccttgatagtggctttgttagaaaaacaagctctctctggcttgcttgctctgtcttgccatgcaattctttcaccatgtgatgagacggcataaaggcccacaccagatggctggtgccatgcccttggacttcctagcctccaaaaccatgagctgaataaacttttattctttgaaaaatgatatttagttataacaagagaaaatagactgagaaaccatcccatctatagtttgttttcagctgggcacggtggctcacacttttaatcccagcactttgggaggccaaggtaggcaaatcatctgaggtcaggagttcgagaccagcctggccaacatggtgaaaccccatctctactaaaaacacaaaaattagctgggcgtggtggtgcacacctgtaatcccagctactcaggaggctgaggcaagagaatcacttgaacccaggtggcagaggttgcagttcaccaagatcacgtcactgcagtccagcctgggtgacagagcgagactccatctcaaataaataaataaacaaataaataaaaatcaagtttgtttttcctagcatttaccactgtttgatatgatcttctttatttgtttayttgtcatggttcatgtcctagtctcctgcatgtggaccctgtgagagccagggccttgtctgccaccatatccttgatgttatgaactgtgcttgccacacaattgttatgactacaaatgccaatacctacataatactcattgtatgccagccaccgtattagttcgttgttaaaaatattttaatatttttaatgaattacatatatttctaatatacataaaaatagaataatatgatcaaccccacataatgcccgtcacccagattcaacatcatccagattctgccacacttgcttcacctattcttctgtcttttgttccttttctgtctttcgtttctttttcctgtcttttgtttctgctgaaatattttaaagaaaatcccagacatcgtgttgtttcaccacgacatactccaattcatgcatttttcaaaatgaatttttctcatttaacctcagtgccatttatatctttccaaaattaggaatggttcctccgtatcctcactcagtctgtattcagattttcctgattgcttcaaaaataactttttaaagttgatttatttgaattaagagccaaatcatacccacatactgcatcgatttgttatttctcttaagtttcattttccccatgctgttaacttgttgtagaaagcggtgattattattatctattcagttatgagatgatgagggcctgaaatggggctgggtagtaggagtaaaaggaggaaacgatctgaagagaccttatggagcagagtcatctggttaacccagctttaggccagtggagtggcgacatcgctgacctttctgagacacctgggagctacaagatcaacagtgaccttgtttcctcttacagggtccctagtgtgacaactgaagggaacttcacagatgagctaattgtaccttttgttttagtcctttttccagcctctcccagctaggcagaacatctgtacagtcctcccacttgttcacaragttccctctttatcttgcatcctctggagcttgttaggagagggtcagcctccatacatgggacttaccatggttcccaaaccagccatgcaaccaagcttatgattgcttaaaaatatactrcaacagaccaggcgcggtggctcacgcctgtaatcccagcactttgggaagccgaggtgggcggatcacgaggtcaggagatcaagaccatcctggctaacaaggtgaaaccctgcctctactaaaatacaaaaaattagctgggcgtggtggcacacgcctgtagtcccagctactcgggaggctgaggcaggagaatggcgtgaacctgggaggcgcagcttgcagtgagccgagatcgcaccactgcactccagcctggacgatggagcgagactccgtctcaaaaaaaaaaaaaaaaaaaaaaaactgaaacagctggttccctgccttagagctcctgaatcagaatttgtgggcatgctacctgggaatctgaaagcagctgtgtcataggttttgtccggttttgtccagtttcgtagttgtttatggtgaaaggcaattccagtaattgttactctgtcatggccagaagaaaaatttctgttctgatttttaaatttgaattagttcatttaatcctttcacaaattctaagaggtagattattatccttgtgttttcacacattttaaaaaaaaaagctgaggcaaaacgagactaaataacttgtccatggacacattgtgtaagtgctagagccagattttgaatctaggccgtttagctccagactctgtgctcttatacatcaacctattatcttacataatagctgcttaattaatgtattttggatgaatgcagtgaaggctttctcttctatctttcttacccatttaacttctgttctccttgccagaaaagtctcaaccttaccttaatccattgtgttctcttctgcaccaagacgtctcagcacactgcagaaaatccaacttctgggcagactgagttcctgtcaagttatctgggctctcaacaatccctaataattctgtatttccctagtttttgccttctgttttccatagagttcttgtccgaatctcaaacacctgcacctccctattcattattttcaggaaaaacatcattttcagctcagttttctactcatcccttataaatttgacttgttttggcatctgtccttgcctttcctccactgtcaaaatatttagtgtttctctatcagaggctcatccacttttagctactgccctgtctttcttccctttcacagccaagctttcagaggtgttgtttgcattttctgtctgcacttcctcaccaccctctcacctccagctcactccatcactgcattctggcttctgtactcattactttattcgtttactagtgtcgacttttatctttattaattttgtcattgcatgttatttaaatgtacttgttattctttttttaacttcttggtttagatgcttaattcatgtattaattatcttctgttattaatataattaattaaggtcatagattttcctctccttagtgtcctatagattcttatgtgtagagtttaaaaaattctagagaattttcaatttttttggtttcttctttggtccaaaaatgtttaagaaaaaaatttaaaatttccgggtggtagagtcttttgtttttgtaatgaatatttattttgttgcaatttgatcagagaatattttgtattatttctaccttttgagaatttaaacaatttctttgaggctttttatataatcagtttttgtgaatattccatgggtaccttgaaaagaaggtatattttctatttttagattagagcattcaatacgtgaattaactagatttgaattattaattacattttaatatcttctatattctcatttacttaggaacgtgtgaacagaggaaacctgtgccctttccctgggcatagcctagaaagtgtcaagactccagactcatctctattctcaatgtggtgctggagcagaagcaatgctttgatggttgtttcacagcccagagtatcgtaagcagagggagagtgatttcccttactcccgtctgagtgtatgagtttggtagtgttgccataaaaaaagaccacagactgggcggcttcaacagcagaaatttattttctcactgttctggaggctggaagtccaagaccaaggtgccagtagggttagtttctagtgaggtctctctccttggcttgcagatggccaccttctcactgtgtcctcctatggccttttctctgtgtgtgtttccctcttctgataaggatagcaatcctactggattagggccctattctatgacttcatataaccctagttacctttttgtttagttcttttttttttttctcgctttgttgcccaggctggagtgcagtggcacgatctcagctcactgcaacctttgcctctcaggttcaagcaattctcctgtctcagcctcccgagtagctgggatcaaaagcatgcaccaccacaccctgctgatttttgtatttttttagcagagacagggtttcaccatgttggccaggctggtctttaactcctaacctcaagtgatccacctgcctcagccttccaaagttctgggattacaggcatgaaccaccatgctcggctccgaatgacctttgtaaaggctctgtctccaaatgcagtagtcatattggggccaaggggttcaacatatgaattttgggagtgggcagggaggcaggcacaattcagtccataaaagtagagaatgggaatagaagggagagggaaatttgttttaaaagagagaaagacattgagactgtgtaaaggggatgttgcaaccttttaaaatctgtgatctcagaccaaattatacaatataatctcagtaggtgccagtagtagggaaaagtgtcagccctcgtgtctggcactaagtaccacccaccccaaccccagtgatgggagcctctaaatgactgagatttaatgtctactacctatttgaatgaggacttgaagaagaaattcagtgcagttatagagcaggtgctttttgcacacttatccccactacatgtgtggctccagctcaggtctctctgtgagtttttgacctgcatctgggttagattcaattttttagcctcaagccaagcatgctccaaatgcaactcctcgtttctcatcatgtcatcctcttcaccctcctctaaacctgttcttcttcctgtgttccctactttatgaattaccagcatccactcagtggtctgggacagaaaccagggtgttgtgttcgggagctgaaaacactaaagactaaaacccaatgaagacatcttcatcctagtatctcacagctcctgggggttcacaggagattttgtttaaaaattaattaggtatgctacttaaaaacccaccgtagaagagagtgcagtacagtggagcagaagagatgggaaaccctaagctgctaaaaagcctgggggttggttgaggggggcatctgtgcagagaaggaactggaaggagggagaggtggttgtgacagaggtgaatacctgggagaggaaggttcaggaaacttccttcattggctgttcaattcttcacctaaatgtctagaggtggagctgggcttgcggggatggttactgagtctgaactctgtcaagaaaggcccgggggatcagatggtttgctccttcctggacaaactccctgccctccatgactcttcaggaacccacagcacctgacatcttttgggtggattgtgagcccatagcccgcctggactacttcaaatccagccggaatcttttgggaaatggattcctctatttactgtggaaggactacagtgacatgattaagtcagaagctcatctccttcaaccttgcaggaggtctgtgggtgctcagggtagctgtgaaaactttaaatcaggtgcagctctacttcaaccctggggcagggttagagagggaggtgggtgagacccaccaggtaactgacagacacgttggaccttcagagtgtgtggaactgccctaagggaaaattttagttccacttgatacatggtccatggtgggagaccctcaaagtctctgaggtttctgaggtcgagatttcctgcccccataaagtctaagagttgtatctttgatggtcctgagtgaagctgcgaaggcatcagaaagtaggaagcctctctccacctgcagggtggccttgactgctctgcccgtcaccagtgtggctcatgaaaacatcactgtggatggcttccagatttgctcctagggaaacaatggtactagccaggttagaccattgaaatcaaataacgggtatcttttcatgattaacaggagaaaaaataacataacccactagatagacttttcccacttacaatttttctgccataaacttttcttaaacctctgatgcctgcctcaacctacctgccactgtaccctacagataaaacaaatgagcagggagcaaatgaagagtagcagcagaacccaggcgtgaatgagcatgctaagttcaatagcctgtgtttctgtgttttcctggatctgcacgtatgtgcctctgattttatattgcctatggacctgactactgtagtgtggtatgtttcctgctggcaaaattgttcataatttgtgtattagaattaaagagatgactatttcctgtcgttctacaaaaaggaccaagatttccaggtgctctgccatctgaagacatttaaagaccagttacagctcagggataagagggtgaaagcttccagcttaggcagatggcgagaggcgcttcttgctgaacaagaggttggagactgggccagaggaggaattataacagattcagcttgttttctctcctcactgccttgttcattttggaagccccttgccagagtccaaatgatattgatattttgtgtcaacccagtctctccctagctggagagaggtcaagataggaataagagaccaagagttctgtgcgcagaccctatagtctcattttagtccccatgctgccaagcaagattcttagaacacagttgatacttaataaatgtttaaggccaggtgcggtggctcatgcctgtaatcccaacactttgggaggctcgggtgggtggatcacctgaggtcaggagttcaagtccagcctggccaacatggtgaaaccccgtctctactaaaaatactaaaattagccgggtatggtggcacgtgcctgtaatcccagctactcgggaggctgaagcaggagaatcacttgagctcaggagtcggaggttgcagtgagctgagatcgctccattgcactccagcctgggcaacagagtgagactttatctcaaaaaaaaagtttgagaccatgttacagatggtctcagtggggccatacagcacttcagtgaagaacaattggaataggaaagccagtgtcctcatgaatgtgaccagttatctctgaacaggtaatttacagtggtcaattggcagttgaagtgacaaagcttgttctctactagttgctgccacacccctcagtgccttcctgctcctaacactcccctcctacccctgctcagtgctggggactgtgctcagtcatgtctaaggctgttagtgcagataaaattccaaatcttagagtctgcattcccaagtggttgactctctacaccccaaacaaacgtgtctctctaagaagtctagagaaagtagaaccttttgggaaaggtggacctcagagccatgcttcgatactgacgatttagaaatattcttgttctaaaacaggtgggctgataggaaagtgactaattggcattggccctgaggccaccattatcagctcctctctgcctgtgagtctttctaggagaccattgcctccaactacatggacaagaatgtcctggagctgaacaggtagcagagacagaggctgcagtcatttgactggtctccagtggtaaaatatgtatgtgagcttgaagggattaggcaaggagttcggtgtttgtttttgcaccttgaggatgccagagcttcacgtggctctctgaactaagaattttctgtggggctcatgtagaaatggcaagaaagatggagactaagaaagaaggatgtcagtggaactgcaggaagaagaaaggaagagtgagttctataaagccccaaggagggaaccaaagtagatggctagagacaagcctggagccagaaagaaactgtcccagatgccaagatctgagcccaagcatatgcataacaggcaggatgacagtcagctggcttttgatggcaggcaaccgttctgactggtcagtgttcctgttgttccaattgcaacctccagacttttgaccctaaacctgtggaagctttctgtgggtctcctgaggtgacctctcactgctgggaacagggaaacacagagaaggccatcgctgggattggagttgggaatggaattaagaccaatctaactttgaggcagaatagaatttacttaccttgcgtaatttcaggcaccaggaaagttctccatagcatcttcactcccaaaataccccacatcctagttaagtaagaaggttgaagttgttcattaggtccttcttcattttgcttaagacaataacatttgtaatacactattgaagagctgtaaagagtaaccctttaagtgctagtccttattcatacctcagtatgaatgagcctcatagcctatactaggtatttaagaagagaatgtgacaactgagtggagtgtgtagccaggagccactggaagggaaagatgatggaggtactggatgtcctcaacaacatctaccaagctcactttgtattaatagttttgctctgctggttccaggcagactttccatttccctttgcacttggctgacttgttttaagtcatggaccaggcagagaaagaatgggctgattgtcagaagcacattgcagagacagccggcaagtggaaagagcactgactgcagggttggcggtccctaggcttgcycgtgccaatagctgatgtcatgactgcatctccaggactcagtgtcttcatctgtaaaaggagtgacctgattctgatattctgagattctgtgagtgtgtgtatggcttggggttagggttatggttaggttttgtgttagaatattctgatatcttgcgagtgtgtgtatgggtttagggttagggttagaatattctgatatcttgtgagtgtataggggttatggttatggttagggttaggatttgaatattctgatatcctgtgagttgtgtatatgttaggggtagggttacagttaagattagggttagaatattctgttatcctgcaagtgtgtgtatgagatgcagaaaatgaccaggagtgatctatatgtcccatgaggtaagcttgacccagctggccactctttccatttccttctttccagagagaagtgggctgaaaaggaggagtgtttaaggaaagcgactcaaatgtgcttacatgtgacatttggaaagaatggcctctgaaacctgcagtcctgcccctggccgactgcctcgttttctccctgtggtttcaggctgcccccccacccaccctgggtacctgccaaggcaccttgtgccaacttgggaccctgcttcaacccagggaccgtatgctgcaagcagaggctttgagaccagtgtctacatggtgggggacaagaggttctccacactgcccctagagaggaatttctgcaggagcccctgcaggagacaggcttggatttggagaagttggagaaggctcagcaggcagctgagagccacttccacgactgcccagttgacccagagatgttctctgtggcccggcgaagggactgatgcagcagacttggtaggagctaggagtgcacaggggcaggatttccagatgccatcctgctacctcatttgctttcctcttcgtttagtctgttttatttagaaaccttaccagcaaatgcttttagagtcttattatacatgattgccaggtaaataggaatgttgatctcaaacagagaggtttataatatgctccactcatggcccagggagggagagaaagaattagaccagagaaataaagctgtgcttcttcttgtttcaagggctctgcagggttgcatagagagaagaggggagagccccccatgatctcctagtttaggccatttgtcaccacacaacttctgagcccattcagcacctccatcctcacccctgcgaatactgcagccctaccccatgaaatgagaagaacagaggtttccgcatcaggagacatggcttttcctctttggctctctgacttacttgctctgtgacctttggtgggtcactaacatctcagagcctcagtttcctcatctctgaaatggaaataattgccaggtgcagtggctcacgcctgtaatcccaacactttgagaggctgaggcgggtggatcacctgagatcaagagttcaagaccagcctggtcaacatggtgaaaccccatctctacaaaatacacaaaaattagctggcgttggggctcatgcctgtaatcccagctactcgggaggctgaagcaggagaatctcttgaacccgggaggtggaggttgcagtgagccgagatcttgccactgcactccagcctgggcgacatagcaagactctgtctcaaaaagtaaataaataaataaaagaaaaagaaaagaaagaaagaaatggacataataatacctatccccagggttatcgtaagaccccaaagatataataggaatgcacttagtaaataattatgtgtgtgatgtggtatgtaagagttttggctgactttatatatatgcatgaaatgagtggttctaaagagagctggataagctgtcttctttcttgatccaacacaaaccatctaacccagtctgaggcagggaggaggtacttggggaaagactttttgaaggaagtagcagcacattggtgagatgtaaaggatatttgagggtaagccacgtgaaggaatggggttgaggggtgaagagcaggaattcccacatgctgagacctggagaagaaataacatactatgttaggtgaacttcaagaaaagtgaaagaaccttagatgtaattgtggcactatccctagagggcactactaaggctgtggtaraacaggacagtgctccaagccagcagagaggaccagaggtaactgttgataggcatgggtggtgggcaggtaagtgatcgattcattcaacaaatatttgtggagtactctgtaaagctcagtgctaagctcagcatcagaacctttgcccagggttggtcctcatgctaaacatagttgcaacacgtaagcccttgaccacattctgcctcatgcacctactctgcctctttttctctccgttagttctgacatcggtagtttttaccttaccctttacccattactaaaagaagaaatatgttggctgctatgttagtccattttgcaatgccgtaaaggaatacctgagactgggtaaatttataaagaaaagagctttatttggctcatggttctgcaggctgtacaagcatggcgttaacatctgctcagtttctgttgaggcctcaggaagcttacaatcatggcggaaggcaagggaggagcaggcatttcacacggcgagagagggagcaagagagagaggaggagatgccaggcttctttaaacgatctgctctcttgtgaaagagctcactcgttactgtgaggatggcactaagccattcatgagggatttgctcccacgactcaaacacctactaccaggtcccacctcccacattaaggattacatttcaacatgagatttggaggagacaaatatccaaattatatcagctacatcaagaatgttctctttgtacttaggtacaaaggttgtggcactgtccctagaaggcactactaatgttctgggcacctggtgtgatagaacaggccagtgctccaagcaggcagagagtaccagaggtgactgttggtaggggtgggaggtggacctaatactcatgtgtgtgtgtgtgtgtgtgtgtgtgtgtattatgtgtgcatatgtgagtgtgtgcacatgtatgtgtggtgattcaggtagtggagagtggctagatctgtcagtggtgtcaccacatgggtgatgaatgaggttgtatcccaggtgctggggtcagatcagaagttggataccaggagaagcttgcagcagatgggaccagaggctgagtgttaactccttccaaggggagctccaagtgtacacaggagtgtgcagccagaaagctgctatgggatgggaaggcataaggcaaagaacaaggcagccaggcacatgtgcagggtttccagggcaggtgccctacgcaagactgggttgcctggtgctccccttgctgcataaagtaggatggaccagcctgggccacccaggacgagggtgtgtgtcctgcgataggttcttctaaggacctggtgttagttatgtgaacattcacattgggagactattggctcctttgatcctcaagtcaccatatacacgtgggcccagtgtgagtaggtattgctattggcctcacgggagagagggtgatactgacatgtacaaggcgtggctagtgacagtgaagagcttacaattcactgaatttattaaaaaacacacagcgtgcttttattaagtccccactgagtaggcatgggactctactacaaggcagaatttgctaattctaatacaaggggatgatgggaagcacagaagagggagggattagttcctgctggggaactggagaagacttcatggaggaagctgcagcgaagatgaatcttaaaggagggtgatggttggaaaggcattcctgctagaggaaacaacactgctaaaagcatggtgctggggtcagatcaggagttggataccagaagaagcttgcagcagatgggactagaggctgagtgttaaccccatccaaggggagtttaggaagatgctgggtgaatgatgtgatgtttcatttggctcatttggctcaagggtgggctccctatgccagagcagaaggagacagtgctaggaaggtagctcaggcgtggctctaggagcccctgcaatcagacttcaccaataagtattcatatatcatttgccaggtactaagaatgtgaggataacaatttttgccctcgctgggcttgcagacagtagtggcagcagtttataggaggtgagagcgcacagaaagaaatgcctaatttgggggagataatggagtctttacaaagaggtaacatgtccacactgactttgaactaacaggaactagcaggttgccaggcaggtggtgagatgaaggtggtggtggactagggcgtcgaaggtgtttcaggtggaagaagccacgtgacaaaggtggggtcacggaaggatgctgagcgtgtttgggaaacctcgatcaggaaacatgtactgagagtctgctatgtgccaagccccattctgcattctgaggccatggagaatgagtcagacagggagggccctgctctcattctagttgggaagggaagggaaggcagacaatgagaaaataaacaaataaagatgaggacatgattttcagaatgggagaagccctaaaagtagaaagaatggcactgtggagagtacctggggcagagggctggagggagggctgagtacaagtgcctgggatagacagacctgggctgggctcacacagccagatggtggtgtgtgagccgggagcccctagggcaagggtgctaagcccagtagtcaccctttcactggaccagagctctccaaaggtggagcagagaacacctctgaaagcagaatctacaggcagacaggagctgatcctgcctgttgcacaccctgtctgcccgccctgccccagagaatccccttattcattttcaagcccttcctttttcccttccagagaagggtcttaggtactcagaccttcaggggaaggtacaggcagtgactggggtgggtggtccattcttggggacaaggcaggtcatcctgctgaatgtgtgtctctgcgatgtgccctttgggaaaaggaggaacaaggacagcaggatggctgcaggcacctgaccaagacctgtttttggattatttcccttgtctttcactctctgggcacaagagggcagccaagtcttgagcttgggggctgcagggccagtggggtgggagggctcttccctcctttgcttgtccccggcctgctcatttgccggcagcctgcactcctgttctcccagatcctgaccactgaatgagggaaccaggaagaggaaggccgcagccagcgcagagtgccctgacctccacccggccatgtattctacatgttgcctcacctccaccacagaagctgaggcccaggaragccaacccagacctgctggcccagggtcccactagggacgtaggctagcccatatgctgcctggatgacagaccgagggaggggcacactagctggcctctggaggagaattcttccagcctctctctgctgtagtaaaaacctccttaaaacccacgaagctggggcagtaggaccaattgcagcagatggggcacaattagctcactagatccgttcaatggctattaaggccaatccgtgcgttagggcccatgcaagtgggaggaatacaaagatgaatgggattcaggctcttccaaaaagcttaccttctagtggacaagtggccattggagcataatgtggcaagtttagtgagagagagatgttcagagcactggggagtatagaggaggtccattaacctagccctgggggtatggtggagggaggtcaatgaagtcttcctggaattcatgcccaagctgactattaaagataaaagaatttagacaagcaaagggagggagggcttttcaggcaaagggtcagacagtgtgagcaagaaatcaaagtcaagacacaacatgagagggattagaagttccagtgtgtttgagaaagttccagtttggcactgtttactgttgcaaccattttaatagatacacrctccatgagctggctcttgtctccctcttcagccagttgaaagggcttcttgaacaggtttgcacatttccacaggggctttggagaactgagtttttctaggctagggactacaggattaggggaaattggatgccaaaaaagagaattagaggcagggaaattagctttctggcaggcctttttctctgggggaatgtcttcttcactgtgcctgaacaagtgactcctgtgcgaactagagactgatgaggaaattgacaaaggaaggtaaagtgactaaagacttctgtgcctgaaatgaagtacactcaagaggaatccagaggttaagatcataaaccccagcctgggcaatgtagtgagatctccactctactagaaattaaaaacgccaggcatggtggcatgcacctgaagtcccagctactcaggagcctgagatgggaggatcgcttgagcccaggaggtcaaggctgcaatgagttgtgattgcaccactgcactccagcctgggccacagagtgagaccctgtctcaacaaacgaacaaacaaataccccaaaattgtaaacaaatacaaaaacaataaaaaaattagattcctgcttgataattagattcctgccaaagtgatcaggtggacagactggaagaaatatttacagtgaataaaaccaacaggggacagatattttctagaatatacaaggaactactgcaaatcaacaataggaaaaagtctaaagacaaaaaggagcaagaatatgaccaggaaatgtatagaagaggaaactccaaaagctagcaagcattttgtgacagagattgtctaactcctccccaatttgcatgtccttttttcagcacacatccaggctgtatttcacagcccccttgcctcaggccatgtgatggaattctgacccaaagaatattaacagattaatgtatggcactacttaggctgtgtcctcaaaaccctcgcattccaatctcctccgagagctctctcccctcctctgagggctagatgaagagaatccaatggaaggctctggggccttagagccacacaatggaagaagtctgagtgccsaaaggaccactgggggagtacccttcccttgcctgccatcatggtctgtgatgtgaaaacaaacatttattttgttaagccactgaggtttgaggtctgttacatcacttagcttatctcactgatactgatatgcatgtttagaagtgctcaaactcatcagagaaagtgtacaacttcacttattctcattagactagcaaaaattagtatagcagatcattctaaaaattgatggtagggatgggagtgggtgtgccgatacagggaacctcatgcactgctgatgggggtgtagactggtatagccttgctgggggcaatctggtggttcttactcaaattaaatatgtggataccttargattcaccagttctactactgggaatgccccccataggaattctcacacaggtctctatatgaaggagacatggatgtctctggaatcattgtgttggggagttggaaacaatctgggtatctgctcctgggggtgtggataaataaatgaggggtgcaaatcatgaagaacgatgcagtggcatgaagcagtgggtcacatacacacgtaatgtgatagggctttaatgcatagtgaaaatgatgcaaatacaaatatatgcatacacagcagcagcacacattttaccaaaatgcacataaagaatagacatcaaacaccttgggatggttgtctatgaaagggaaatgagagtggaaaataaaaggggaggaagaaaatataatcatatgagtgaatttccttccactgtacagattctcagttcattccgaaagctttttgacaagagattgaagactgacaatcacagctgttttacttccgaggcttagttttctttacagaatcttatttccatgaggttattacgtctatcctcaatttttaaaaaagcttatattctgcctttgttgcttttttttcaatttaataagcattttcttttaaccacctgacctcatgctttttcaaaaactaaactaaacaaaacaataaaggaagaagagaattacaagatccaatcttagtcctaacatcttttaccctgaacataaaacgatttgctttttacataggtaataaacagagggagaagagtgaacttcataatcttgatatttgtatagcattagtagtgataggacagatgtcctaaataggtatcgtaccgttacagtaattagtaggaagcaaagaaaaatcaatggaacagagcagatagccctaaatcagrtcccagtaagttttgtaagtaagcatgtgacaaaggagcaacaagccgaggaggaaaggaaacaaagcaaaatagtgcagatagcacagaagccactcaggttttcagcttttgccagcaggatattagggaggctccaccctgatttccagcctcyctgtgccaggcagatgtggatctccagcaagctggccacctgccacagcaacactgctggtacctggctctgccaaaggccctatcaccctggatgccatctgcctgcaatttacaaactgtataggaggggtaggtcaggcctggacacctcgtggctggactatggaaactggtcctggctgaggctcaggaattgctttcctttccaagtagtcctcaaccaccttcaccccaacatggttttttttgtttgtttgtttttgttttttgttgctgttgtttttcttgagatggagtcttgtccaggctggagtgcagtggtgctatcttggctcactgcaacctccgcctcctgggttcaagcaattctcctgcctcagcctcccaagtagctgggactacaggcatgtgccaccacacccgactgatttttgtatttttagtagagacggggtttcaccgtgttagccaggatggtctcgatctcctgaccttgtgatatgcccacctcggcctcccaaagtgctgagatkacaggcgtgagccactgcacccggccatctttttttttttttttttttttttttgagcagagtattgctctgtcacccaggctggggtgcagtggtgtagtctctgctaactgcaacctccaccttctgggttcaagtgattctcctgcctcagcctcccaagtagctgggattacaggtgcataccaccatgacgggctaatttttgtattttcagtagagacagtttcatcatgttggcgaggctggtcttgaactcctgatccgcccacctcaacctccaaaagtgctgggattacaggtgtgagcgactgtgcctggccccaacatgtcttttctcccatcacgcttcttcttcctttagccaagaagcttgccaccttacacccttcctctccctccctccttggcatccttctcaaagctttctgtaacctgaacaatggatttagaagccagtgaaaatatttgagacgctggagtattgataaccagataattagataactagagtttctggctgaatcagtgtctttgtggctatggattttcaacccaaagctctacgagagggcacactgtgagaaccaggcagaaggcagccctctgcgtacatacagtgacgcccttatggtctgcagcctcatttttaccccaaaggtagccatgacttaagagtgacaaaagagagaagctgacaggttgtggactccaagaaagggttctctacctccctgcaattaaggctcatattaatcagctctggactcaccatatgcatccactaaaatctagagcaggccctgcgggagcacatcaaatttgatgggttatagttttggtgataattttgtttatttgytattaattaccaagcacatgaaatgctcccaaattactgatgcctcttactccaggagttgcttaatttggctctgccttggaattctttcctggcgactcacgcctgccacaaggtatggtttgagcagagaaagaggaagaggctcagtagttgcttctctgcaacatatgtgaataccccacccacaattgcagcaggaagaggtgaagggagcaggctcctaattgctgtggcgtacccaggggtacatttctttcttggagataagcagaaggcaaggagtgtcaaatgagagatcactgcctacagaagtctgtgtcatctctgaagcatcctggggccctctgatctacagtaggccttgatgtcatctgaggcacagaaggacttcttccagcattggaaagaaaagcttggaaggaaagcttcagctgcagtttctgtaatgttctcctccatccttgccccatttttgcagagatcgttgtttatcctttagtaccattgagtaccatttagccccactgggtaaaattgagtgaaaaagaaacactaggtcctgcctcagagaggaaacttgggaagaccaatattatcaagtagacttgatctctaaatttgtgcttgtttcgagggactctgcgtctggatatgcaggatgttttttaaattgtgagatgcatctacagaaaagttcatagaacatttacatagagcataaaggttaatataaaatgcatgagcactggttagcattgcaggatttttgaagcaccctcttccccctgtgttctgtaacctgagcacaactttgtcctccccagtcacccacaggcaaccactatcctggcatctaatgaaattatctcattgtttttctttagttttcccacccacttgtgcatcactaaataataaaatttacttttgtttgttttggacttttggactttatagattgaataaaaaggaagtctttcttgggactttcttctttcgccctacatcatttggagaatcatccatgctgatgcttgtagttctaattggttcattttcattgctgtacactccaatttattctaccattgttggacttttaggttgtttctagttgggggctgttccaaacaatgctgctaagaacattcatgtttatgtgccagatttttctctaggtgtgtacctggactgtaattactgggcatagggtacgcagcaactcaactctaccagtcaatgccagactgttttccataacgctgcaccaagttacatgcctgctagaaatacacaaggacatctattggtcaaggcctttggtgctggtcagatgtgatttttgccagtttgatggctgcataattgtatctcattgtggtttaatttgcattccactgatgagattaaggatcttttcctaggtttattggtcacttggatttcctttctcagaaagggtctgttcaagttttttgttttctttattttcatattgattcacagaagttctttgtaaattctgttgtcagaattcataaattcttgcttgtcagtttcatgtgttgtagtatcttttccctctctgtagagtgtctcttcactctcttaaagtgtctttggtcgaacagacattcttaattgtaatatactagcatttacaaatcttttattcatgattcatggcttttgtgtctggtttaagaaatcgttatctgcacccaaggtcataaagatattcttctacattaccttctaaatctttagagttttgcccttcatatttagttttttaatctgcctgaattgttttttgtgcataatgtgaggtggggttctaattccttattcctccctacagatacccaattatcttagcactatttattgaaaggtctatctttttccccactgatctaagctatcacctcaatcatatatcaactgttcataaaagtacaggtctgtttatgggctctctactctgttctattggtctatttgtcaatcctactaccaatactactctgtcttaattactacagctttataataagtatttatatctggtagagcaagtcctcccaccttatttttcttctttaagagtaactactcttggcccttggcactgtcatataaattttagagccagcttgtcaagtttcaccaaaaaactattgggattttaattgggattttactgagtctataaatcaatttggagacaaatgacatcttcaccatgtggagtccccccatccatgaagtggcgtatttctccatttatttaggtcttctttaatgtctttcaataaaattttattattttctccattaatgtcttatacatagtttgctggatttattcttaggtacttcatatttttcagtgccattgtgggcaatgtctgttttaaatttcattgtatagctgttgctgattagaaatgaatttaatttttatattgatttcatatccagatattttgctaaactgttatattgtaataatttacttgtagattatttttcattctctctctatatcatcatgttatctgctaatartaacagttttttctttttcctcctcaatacttacatttttaacctttttttaacctgccgtactgtccaggatgttgaatgaaattggtatttgttaacatttttgtctctgttcaacttgaaaggaaagcttgtaaatgggtcatcgggaagagtgatgtttgttgaggtttttgtaggtaatctttatctgattaaggaagtcttattctatttccagtttggcaaggattgtttttgttgtgaatggatatagaatttaagctttttcttttttttttttctgcatctgttgaatggatcagaagatatttttcctttaacatgtacatgtgatgatttgtattaattgaattttgaatgttaaatcactttgtattcctgggaaacactcaccttggccattgtatagctgctagaaaattaggctcttgagttagattgcctgggtctaaaacttggctataccactgtctagcagcgtgacctgggcaatttactttacatttttgtgccttgattttctcatatgctgaaatggggataataayagcccttaactcacaaaacttctgtaaattttagtaatatgtccaaaatgcttaaaccagttcctgaaaaatagtaagcaccatatacatatttgctactttattgaccagacaataacttgtttaggatttttatactcatgctcatgggtgatttttagcttgtaatttttttcttctcataagtaaccttgatattaggctttagctagacttataaagttagttgaggggtattttctctttttktattctctgagtttgtgtaagattagaattattgattacttgaatatgtggtagaattcactggtaaagccatctgctctgaagattttgtatgaaactaattttccatttaaattctttaatggttataaggcaattcagattttatatgtgttatatatttatttggaaacctctaaatttaatgtttcaatgtataggcataaagttatttgtaatatcttgttattatcttttaaatgtctgcagcatctgccatgaggttcccmtttttattcctgacactgggcatatgagccttctctcttttttgccttgatcattctagctagaaatttgttaattgtatttatcttttcagagaaccaacttttggacctgttgattctcccattaattcttagcttttgtgctctgcaggattctcttctttctacttttgtctattttgctgctcctttcttaacttcctcagctcattaactttcagtttttcttctttactagtatgcatatttgaggactagagttccctttaaatcctgccttagctgcaactcatgagtttttatatgtagtatttttattactactcagttagaaatattttataatttccattatgatttcttctttgacccataggttgtttgtttctttatttccaaacaaataagggtgttttagttatcttttattttttacttttagcttaaatgcattggtcaaatagcaagccctatatcatttcagccctttgaaatatgttgaggcttgcttaatgggctagtatgtaagaatttattaagggcctatgtattcttgaaacaaatgtgtgtcttagaccatttgggatgctctaacaaaatgccataaacgaggtggcttgtaaacaacagagatttgattctcatagttctggaggctgggaagtacaagattgaggcaccagcagattcagtgtctggtgagggcctgtttccttcttcgtagatagcactttctcaccgtgtcctcatgtggtgaaagggtgaatgagctctctcgggcctatttcataagggcactgatcccattcatgaggcctctaccttcatgacctaccacctcccaaaagaccccacctcctaatactgctatgttgagcgttaggattttaacatatgaatttgatggggaacaaacattcaaatcatagcagtgggtgtttgggtgcattatgttgtatatgtccattaaatcaagttggttaatcctgctgttcatgtaatacatattttaactgatgcttttgtctgtttttaatcctcaaccaaatatcttcttattttacgctttgtatttgtccttaaagagctgtttctttttctctccattcttatcttctttcgaattgatagtattttgtcattctagttcttctgctctactaatttggaagttaatacactttgattatattattttgtggtgtctaaaattggagtgtaagtattttattttggatcccactaagcaccagtgagggaatggggaagtgagacagggaaagcaagcaatctgatgcaggggggattaatgtggaaaactagggctcagccactttaattccatctttcttatttttaaccacacawggcattattttttatgtctattagaatcacccacatgttggccttctcagttaattcttcattccttcttgcatttcagaccttccactggggttcacattccttctgtctgaaattcatcatttagaacttcctttagagaggacgtactagtggcaagcttttagttttgcccgctactttctctattttgtcccaattcttcaaagactttttctggttgtagaattctaagttgacaattgctttgttttagcacatttacaatatcattctcttgtcttctagcaagcttcctagtcctgcaaagtcagctgttagtgtaactatcacttgtgttttttctstagatgtttttaacatcttttgtagtctttggtgttgcagttttttatcagtaaaatgtctaggagggaattgcttttcaaatattttgcttgtgattcactggacttctaaacatagtccttcctagactgttacaatgattaaatgagttaatatgtgtaaagcacatatagaacagtacttgcacaaataagtgctcaataaatactacctattttggattctgtgtattgatgtctgtgtcagttcttaatacattccttcatagctccaacccacccttctgtactctgtggtgtgagagctagtctatgtctcttagctttctcttttattttttccatttccctttctccctctgctacattttgcacaatttcttttagcctatcctccaattgcaaattggacagatttacaaattggattttgcacacacaactttcctttgccagtgtctctatgttggttccaccagtgagagattctggagggacatgcaaggcttgaggaggaggaagggacttaccatgtcctgtttttttgtttgtttggtttttgttttgttttgtttctgaggtctggttgtgggcttatgatcctgtgagcaatcttggcgatggttgtctgcatgcagctgttggctcaatgcacggctcatctctgcggtggcattccttgggttcctcaggtgtccagcattcccgcagcagctgtgctttctcatcagagctttttgatgcttggttctgtggactcgtcctctaagtttctaagtttctcctggtttccttgttctgtcagcccagtgagtttctgcatttgccacctctgttacactccrgagtccacctttactctcttagccattaaccactttttacttagtcaattctttatactaaattttatattaataatttctgactcaagtttaaggtgggtttctgtctcctgactggattctgatacagtatttatcatcagttctggaaaattctctgtctttatctgtttaaatattattctagtccatttgatctctcttatctctcagaaactccagtctgacatagagcagatctttctcctctatgctcgatgtctcttagctttctctttcactttttctatttctcttttgccctctgttacattttggataatttttttttagcatatcttcctatttacaaatctattcaattacatataacattctgtcaaactcctctactgctaatatatacaaggtattttatatctatatatcagcatgtttagctttttagcattttaggctttcaggaaaagggtgtatcttgagagttagccagacatattactggaacctgatatgtcaatatttggaatcttttcttccagcaaacataagcaatgatggtgttcacacttttggtttgtatcgtattttctagcaatggatttggtgtagcacctctggagtctagagtgaggtattttctaggagaatgccccactacattgattttttgtgcattaagtattgtagcattattttctcatgaggtcatagcctgggacgatgaatcaaattctttaccagcagaccgtgtgggaagaacagccaccagtgaaccaaatacccagacaatatggaaataacatgtttttctttcttcttgccttccttctcaccctttgtttcttcccttatatgtgcatttatttacttataacaaacatttatttaagggtgggtagagggtcattacaaggaaacagattcctatctataataaaaaatctgattctgactgtaaatcttggaaatttctggagagggtagaaaaaaattaatgatggagtgaggggaaatgggtacaatatcaaggccacatatatgctatatcaccactatgtctaaaattccctggtaaattgacccatgagtgggaatgaggcacatttcccaaggtaaggattcaatgtaaggaaagctatcattgaaattcctcaatacctcagattgaatagtaaaatacgtactgttaaggccattttactcaccaaaactgaggcttaagagtctcaaaagttagtttttccagytgtccattttacaaattgctagtagcaaaccaggataacaacttacatctttggactttctggatgtctcctgctgtgctccattactagggcagtcagcagaagcagggagtgtctgtgctccagcagcagtgcctggggtcagtccacaaagacaccctgcttccattctacatctcctaggtctgtgaattgacatttgaagatacaacagttgcaataatctgagacartttgcctgccacatgcaacttcttgcaatgggcaatcttaataccacacaggtttcctttactccctttccccaccccaacacacttggtgagcaggatcaatgactgatctaagttcaagggcagaggctaccatttggaattgccagaatagagctgtgtgcactccaaccaacagtgtacaagggtccccttttctccatatccttgccagcatttgttattgtctgtcttttggataaaagccattttaactgaggtgagatcatatctcatagttttgatttgcatttctcaactacgagatatgatctcacctcagttaaaatggcttttatccaaaaggcagacaataacaaatgctggcaaggatatggagaaaaggggacccttgtacactgttggaatgtaaattagtacaaccactatggagaacggtttggatgttcctcaaaaaattaaaaatagagctaccatatgacacagcaatcctattgccaggtatatacccaaaggaaaggaaatcagtatatccaagagctatcagcactcccatgtttattgtagcactgttcacaatagccaagatttggaagtactctaagtgtccattagcagatgaatggataaagacaatgtggtaatacacataatggagtactattcagtcataaagaagaattagatcctgtcatttgcaataacatggatggaactggaggtcataatgttgagtgaaataaaccaggcacagaaagacaaactttgcatgttctcacttatttatgggagctaaaaactaaaataactgaactcacagagatagagagtagaaggatggttacgagaggatgggaagggtagcgaggtgggtaggggggatgtggggatcattaatgggtataaaaaatagttagaggccaggcgcagtggctcacgcctgtaatcccagcactttgggaggccgaggtgggcggaacacctgaggagttcaagaccagcctggccaatatgatgaaaccccgtctctactaaaaatacaaaaattagctgggcgtgatggtgtgcacctgtagtcccagctgcttgggaggctgaggcaggagaatcgctggaacccaagaggtgaaggttgcagtgagctgagatcgcgtcactgcactccagcctgggtgacagagtgagactccacatcaaaaaaaaaaaaaaaaaagttagaaatattgaataagacctaatatttgctagcacaacagggtgaatatagtaaaaaataatttatttgtaccttcaaaaataactagacaagtataattgggttgtttgtaacacacaaaaaataagtrcttgaagtggtggataccccatttaccctgatgtgattattttgtattgcaggcctctatcagaatatctcatgtaacccataaatatatacacctactctgtacccacaaaaagtttttaaaaagaaaaataaatagcaaccgaaaaaaaaagagagggagaaaagaaaaaagaaaaaaaaatcaagtgcctggctgggtagaataaattctaaggccacaatgttactgaccatgggttttttggctctcagtgtatagaaattgacacaaggccaatagtcttcccaaacatgctttactggaacttacgccctggcataagggccacaacaaaagagagagcgaattctctggcttgctgactccttggaaaaaaccggtagggatttttttattaggcaaagcacaggaattgacgtcagaggcaggatgtgctgctgggcaaagcatacgagaagtggggtatgcaggtcagcattacttggttgcaatggttatcttgaggaatgggccaactggtggtctggccagtggcaacaaggctgtaaatcaattattcagcattccttcccaaggtgggacacccggcaacattgtttatctcctaaggccagttcctggaattaagtgaaaggatgactaatggacatgttgtcagtgaggtagtggtgtgggttttgtgaccagtgggaatgcacgaaagaatgctttagcggggagtgagctgaagccaagccccatccctactctgtctcaaagtgagttcagaaaaggggatttaaagaattctttttttttttttttttttttttgagacagagtcttgctctgtcgcccaggctggagtgcagtggcgccatcttggctcactgcaagctccgccccccgggttcatgccattctcctgcctcagcctcccaagtagctgggactgcaggtgcctaccaccaagcccagctaattttttgtattttttttttagtagagacggggtttcaccatgttagccaggatggtctcgatctcctgacctcgtgatctgcccgccttagcctcccaaagtgctgggattacaggcatgagcctccgcccccggccttaaataattcttaaaggaagtaaagttaactttgaaagaactatcaggatttggattgactgaaaggagtggggaagcttagggaggaggtgcttgccagacactgggtcatggcagtggtcggtgaagctgcagttgcctagggcagggatggagagagagtctgggcatgaggagagggtctcgggatgtttggctggactagattttacagaaagccttatccaggcttttaaaattactctttccagacttcatctgagactccttcttcagccaacattccttagccctgaatacatttcctatcctcatctttcccttctttttttycctttcttttacatgtttaaatttaaaccattcttcgtgaccccttttcttgggagattcatggcaagaacgagaagaatgatggtgcttgttrggggatgtcctgtctctctgaactttggggtcctatgcattaaataattttcctgacgagctcwagtgctccctctggtctacaatccctggcggctggccttcatcccttgggcaagcattgcatacagctcatggccctccctctaccataccctccacccccgttcgcctaagctcccttctccgggaatttcatcatttcctagaacagccagaacatttgtggtctatttctctgttagtgtttaaccaaccatctgttctaaaagaagggctgaactgatggaaggaatgctgttagcctgagactcaggaagacaacttctgcagggtcactccctggcttctggaggaaagagaaggagggcagtgctccagtggtacagaagtgagacataatggaatcaggcttcacctccaaggacacctatctaagccattttaaccctcgggattacctagaraaatattacaagtttggttctaggcactctgcagaaagcmagattcttaagcaccttctgaaaaatcttttcaagatattctgcctaggtaagtctgttgtctgcatgtctccccactaatgtgagtcatayagatggagtctcagggcacgactgggttttgtgtctctcgttgttgcttcacagcccttttggcatcacccatttatttaactaggataaaaacgaatattggtatagcgattccacagtttacaaagtgcttttgtatccactgtctcacttgatcaagcaaaaggaaaccagaggaccggagtgctgtcctgagtctaccttgatttgctaggcgacttgagggagacttttagcctcaaagggccacttaagtggaaattctaaaacagtacctattctgatcctaactcaagggaatgctgtgaatatgcatgagataaagacctcccaatatatgaagaactgggtgatttttggagaaagacattatatactcaatttcttttttaattaactttccttgaaagtattgcttaatagtttttacattctccatgtaacagactttctggatctggtsttcagtctgtacaccagatgtagatcttttttaccttctcctagaccttaaaattcctgrcaacatgcctccaccctggattggggaataaaaaatgaaaagttttttttttttcttttkgactttaaattttattaaagttkgaggtttttcaaactgatgtgctttatttaaaattcaagtgagacatttttagtcttttkgatatttatattttcttkgtcactatgatgtaaattacagggattkggggaaaatatgggattttttttttttttttggagatatagatctcactctgttgcctaggctggatggagtgcagggatgtgatcacagctcatcatagtctcgaactcctggactcaagggatccttctgcctcagcctctccaataactaggtcttcaggcacacgccaycatgcctagctaattttaaaatttttttgtagagatgaggtctcactatgttgtccaggctggtctcatcctccaggcctcaagtgatcctcctgccttggccttccagagtattgggactgtaggcatgagccactgtgcctggcccagaaaagatgttttaaaaaaacattttgagggaaaagttgtgaacagtagtggtctgtctttgaggatcgccagcacagtcccagggaagacaatgtaaatttgactctgcccactgccatgagatgcctgatctctcctctttgttcctcccactaatccagacggtgtgaagggagacctgctgattgacatcggctctggccccactatctatcagctcctctctgcttgtgaatcctttaaggagatcgtcgtcactgactactcagaccagaacctgcaggagctggagaagtggctgaagaaagagccagaggcctttgactggtccccagtggtgacctatgtgtgtgatcttgaagggaacaggtagagaaactggtgtctacttcttggcttttgaaggtacctgagtgatggttggcaaaagcaacagacagatagggaccaaagagaaatccaaatggagaatgagtggtaaygagagagcgagagcaagagagatgagataggcccatgtgtgtgcntgttagtaaatttgtgtatgtgcaygtgcatgtgtgcaccagagtaatggaagacacagggagagggttgaagaaatggatactgagcaaagaggagtaaacccccaaattttccaggcctttggggacaagagcagtgtgcagtcaagtaccttgggacctaggtttaggacagctgcaagtaaaaggctaacccagcttctcaccagcagcttttggatgtcagtgcttgtcccttgcctcactgccatgctgctgtagccatccaagcctayagaacttggctgtgagtgtggctaatgctgacatcaccagatacaaccaaaatctgactaggtttttaaactgaggtaagaaacataaaggaattacttgaaaagaatttattaatcaccatccatgaaagtagactttgtatactyacaactaatggtcaagatcttacactaccacatctacrtgtaaatttatgcaaatgaatctcatttgttcatgtaaattttaatttcttccaacacgagaaattggcaatagcctattagccagaggtagccacgcctgcaattcactgtctttctcatatccttatgcacttccatcttctgctgattgtctgacaatatccagtctgttccccaactgaccattcactcctggagcaacatttctctgctgctatgcatattgctgagaccccacagacttctttgcaagctgcataaaaagatgaatgtttgcaattatagtatctgcaaataaaaataggttttgttcttctattccaactttatgctttttatttatttttctgcccttattatgttggcaaaaactttcaatacaatattgaatagaaatgatgacagcagacctctgtgccttattccatattctaggataaaaaatgttcaatgatttatcattaagtatattaactattggtttttcatagatattatttatcagactaagttctgcattcctagcttttttgaaattttaatcaaatgttgaattttgtcaaaatttgtttgcatttattaagatggtcttatgattttcctcctgtattctgaaaatgtgaattacattggaaaattttgaatgttacaccaaagtggcataaactacttggtcwtgaagtataattgagctataattttcttctagtgtgcttcacaaattttgatatcagcatgatgctggctggagtcataaaatgagttgggagtgatatcccctcttctattttctgaaagagtttgagtattattagtataatttccttcttaaatgattgatagcatttaccagcgaagccaggtgaatctgaaatttttgtgcgagagaagactttattaaaaacagtatttctttaatggttacttggattttccgtttgttcttttgtctgttttggtaagtgrtacttttcaagaagtttgtcctttttatcttggttgtcaactttattggcatttttttttttttacaatatccttttaataccttattatgtctgtaggatctgtagtgatctctcctctttcattcttgataytggtaatttgtcttgttttctttctgtkgtcttgatcaaccttgctacagattgatcattttattaatcttttccaaaaaccaacttttggctatgttgatttttctctattgtctgtccattttctatttcattgctttctgctcttatttttgatcactttctttcttctagttattttaattttaattcttttctagtttactttatttttttctagctttctaaaatgtcttgtttttaattcttcttttagcttcttaagttggaaacttatatcatttatttcacatatctctttttctaatgtaggcatttaatgctgcaaatttcctttagcactgttttaactgcatcccatgattcttgtatgtggtatttttattattttcaaattcagcatattgtctcatttcctttgtaatttcttttttgaccatgaattatttagaattatgttgcttaatttccaaagtattgggatttttctagctatcttattgttattgctttcaaattaaattttgttgtagtcagagatttattttgtggctctgcatatggtctatctcagtaaacgttctatgtgctttctacattgaaaagagtgtatattgttcagttgtagatatagtttctataaatatcaattaagtcaggcaggttgatagtatcattcaaattttctacatccttactgacgttttgtttactttctctgtcaattactgagagagagtgttaatgtctcaaactatgattgttgatttatcctttgctccctatagttctgtcaacatttgctatatgcattttgacacttgtttttagctctgttatatacatttttaggattgttatgtcttcttgatgaactgaccactttaccattgtgaaatatctccctttatttccagcaatgtatttgtcttgaagtctactttttctgatgttaatatagctacatcacccttcctatgcttgctgttttgcatggtgtggtgggcagcctctaagatggcccccaataatccttgtgtcagtattttcacctttgtgtaatccccttccctagaatatccactggatttagtgattcagtactgacaagtttggtagaatgcagcatagtgatgggatatcaattgtgatattaaattaaaaggactacagcaccactacacacctattagatctaggccagaatctggaagactgacaacaccaaatgctgatgaggctgtggggaaagaggaactcttatttattgttcgtgggaattaaaaatggtgtagccaytttggaagacaattcgactattccttgcaaaactattcaatctagcagttgcactccttggtatgtaacccagaaagctgcatgtattacactcctcagtatgtaacccaaaaagctgtggtatgtctacacaaaaagctgcacacagatgtttatagtagctatattcataattgccaaaaattggaagcaaccaagatgtctttcagtaagcgaatgaataaataaactgtggtacatttagacaatggaataatatccagtgctaaaaagaaatgagctatcaagccacgaaaagacatggaggaaatgtaaatacaattactaattgaaagaagccaatcttaaaaggctacatgtatgattccaactatatgacattctggaaaatgcaaaactagggaagaagtaaagaagataagtggttgctaggggtcggggagggagagataaataggtggagtatagaggattttttagagcagtgagactactctgtacagtactataatggtggacacatgtcattatatatttgtccaaatccatggaatgtacaataccaagagtgaatcttaacgtagattacagactttgggtgataatggtatgccartgtaggccttctgcttgattttgcggtgaacctaatattgctgtaaaaaacaaaatcaatttttaaaaaatgacagctttttattgggtattctgtctctatctcactctcttgtcctggggagtgagcttggaaccaaatttcccccagttgaaccagaaaaaacagagaaataagtgtttgtcatttttagctgctaaattttggggataatttatcctgcagttacatataactaatatacatgatatatctacatatctttttctacccttctgttttcagattatgttttctctttttaatccagactgacaatttctgcctctaactggattgtttagtccatttacatttaatgtaattactaatattacagggttgaatttaaatctaccatcttggtatatgatttctatctgtcccatctgattgttgttcacctgtgtctttcttcctgttttcccttggtgaatgcagtaatttttagtattccatttagtataagtgtacatatttttagtatttattttttmtctcccctgttaacctcttctgtgtcttgtgtgagtttgtgtggtttttctaggaattgcaatatgcatccttgacatatctattgtctcatgaaggatgtaagatattccaaaagtgtaatttccttaaccgactttcctggcccttatgttcttgtcatgtattttatttctatgtataacactataatacatatattgttattagttttgctttagttagtagtgattttatttatttttattgtcttatttttaattttgatttttaaaataaaatttaccatctttactatgtttaagtgttagttgaatagtgttamgtatagtcacataagtcagtatacagttttaaacaatgtatataacaatatatattaaacataggaattttggactgaatgtttttatccctccctcccaatttctgtgttgaaatcctaacccccttatgatggtattaagaggtcggggctttgaaaggtcattaggtcatggaggtggagacttcatgaatgggattagtgcccttataaaaggaaccccatagagctctctagctctccttctgccatataaaggtacaatgagaagtcagctgtctgtggcccagaagagtcctcatcagaccctgaccaggctggcatcctaatctcagacttccagcctttagaattgtaggaaataaatttctgttgtttatgagccacccagtctatggtattctgttacaggagcccaaactaactaaggctatattatgyatatatttaagatcttttatatttrcccacatatctttcttctctagtgtttttcattcctttcccaagatctgttcttctgtttggcatcattttccttcacctgaagaacttattttagtattagttataatgcagttctgctggagacaaattctcttaacttatcaagtcgggtaaaaagttagtaattgttttcctccctgctaacttgaggaatttaacaatttttgataaccaaagtcccctggcatctctcttaccagtatttattattgaaatctgagattttaaagttcaaatattgtaatttaaagtattatttttatattttctttcaagatcagtttggacatttgcttttggtttgtaatcaaatttagaattatttggacatatttggtgctcattttatacaatttttctagatattgagtctttaattttggttcatctgtcaactgaatagatcttcaaatatttatttcaagaggaacatacagtgacgtgttttctaagtccatgcatatatgagaatgtattttgtcactcttacacatgaacaaaatcataaaattgtttaaatattgccccactttttttctgacatgtagtaagaagttgagagaggctattctattttttttagacagggtcttgctctgtcacccacactggggtgcagtggtgagatctcactgtagccttgacctcctgggctcaggtgatttcccaccttagcctcctgagtagctgggactacaggtccacactgccatagctggctaattttttgtagagatgggagttttgctctgttgcccaggccggtgagagcctattttcatatgcattttaacctgtatacccctgacttagaattttatattggctatagccttcaaagtggggctatattcttcaatataaaaataatttcatacaccttttttttctgttgactatgtgattctacagaatgaaattgatattaactagaaacaattgcagctatgacaatttggacaatatctaaagttatttagtaaataaggaaattcccagggtttgtagaatctcagggaaactttgtaataagtaaataaatcttcagtcactgttagacaacacaccttgccaaagtccaaatcatctgtcaagaaggcctttgaaactttgttctcactttctgtatccaccaccggcctttccatctcattcaaaaataaacccttacaatctagcaggatagtaaaagcattacttatctcacacctgaaatgtcagcttggaacaactagctcttgagacactgtcccctcccaatcactctgttggacattgcatttttggcagtaaatttctgcattcttatccttatccttgtgctagatcctgtggctttaattattttaagaatgataatgatcctatgcaactcatgtctttcctgcatcttcaagtagctttatcaacctacaacctatttccttcaagatgatttcttctttatctgaagttttttcttgtgctaaaggctgccaaagacgtatgtactgtctcctgttcttctacctctgcatttaaataccactcattttaaattagctggccatagtggtgcacacccgtattcccagctactggggaggctgaggagagaggatcacttgagcttgggagatcgaggctgcagtgagctgtggtcacattccagactggctggcagagtgacactctgtctcaaaaataataaaaaataataataaaaataaataaccctcatttttacaactatccaaaaaagttttaagaaagtcaaacactaagatacaattactcaagcttatacaatgaacagaggaaaatgagctctttccttaagaaattgtagaagctgcattacttaacctatggttcctggaacttggaatgcatagcttaggcttgtggtccctggactagtagtttgacaacacgtgggagcttttagaaatgcaggctgtcaggccccactagctacctacagaatcagaaccttcactgtaagatctgctaagggtggtatgcacattacagtagaagaagcactggtgtctggagcagggcttccctctaggtgtgccagggcacacacacaggtgggtgggaatcagttgcaggcatgctgtccaagctgttttccttggccctcttgacagcaggtggggcatggaccacctcctggttgcctctgtagagagtggctcctccttttttttttttaattttttattatactttaagttctagggtacatgtgcacaacgtgcaggtttgttacttatgtatacatgtgccatgttggtgtgctgcacccattaactcgtcatttacattaggtatatctcctaatgctatccatgccccctccccccaccccacgacaggccccggtgtgtgatgttccccaccctgtatccaagtgttctcattgttcaattcccacctatgagtgagaacgtgtggtgtttggttttctgtccttgagatagtttgctcagaatgatggtttccagcttcatccatgtccctacaaaggacatgaactcatcattttttatggctgcatagtattccatggtgtatatgtgccacattttcttaatccagtctatcattgttggacatttgggttggttccaagtctttgctattgtgaatagtgccacaataaacatatgtgtgcatgtgtctttatagcagcatgatttataatcctttgggtatatacccagtaatgggatggctgggtcaaatggtatttctagttctagatccctgaggaatcacyacactgacttccacaatggttgaactagtttacagtcccaccaacaatgtaaaagtgttcctatttctccacatcctctccagcacctgttgtttcctgactttttaatgatcaccattctaagtggtgtgagatggtgtctcattgtggttttgatttgcatttctctgatgrccagtgatgatgagcattttttcatgtgtctgttggctgcataaatgtcttcttttgagaagtgtctgttcatatcctttgcccactttttgatggggttgtttgattttttcttgtaaatttgtttaagttctttgtagattctggatattagccctttgtcagatgggtagattgtaaaatttctctcccattctgtaggttgcctgttcactctgatgctagtttcttttgctggcagaagctctttaatttaattagatctcatttgttaattttggcttttgttgctattgcttttggtgttttagacatgaagtccttgcccatgcctatggcctgaatggtattccctaggttttcttctagggtttttatggttttagatctaacatttaagtctttaatccatcttgaattaatttttgcataaggtgtaaggaagggatccagtttcaactttctacatatggctagccagttttcccagcaccatttattaaatagggaatcctttccctatttcttgtttttgtcaggtttgtcaaagatgagatggttgtagatgtgtggtattatttctgagggctctgttctgttccattgttctacatttctgttttggtaccagtaccatgctgttttggttactgtagccttgtagtacagtttgaagtcaggtagtgtgctcctcttaacctcagcatacctgacagaagaaagcttaggcccctgtcgaggtggcagttctctgaggtaaatgctctctgtgcaaagacctccatttctatttaaaaagatgtttgtatgttgtccaaaaatagacacagttgtgccaaatgtgttccacaaactagtgaaccacttctattccaaagcatctctggactttcacagcttgcaaaaggatattgataagctttttcaaaaccaggatcttgatgatcatgatgattgtttcagtgatacctaggaaacattcccgccttttacaaggatgcctctctcttaaataggtgctcttgccaccttatckccccaggaaaattcacagggcaggttaagaaaccttcaactagctatttcctcaattgtaaacatttctactcacaggtctcagagcacttcaaactcagtgtgtccaaaacagagctaccatctgctccagatctgctttatttctggtattcttagctccttgaatggcaccatcatataataaattggacaagccagaasctggaagtcaatttgtcctttccctctctgtcatgttccatatctaacttaacatcaagctctgtccattttacttcctgacttcctctgtaacccatttcttcccgtgtttaccatcacctggtctcagctacccctgtctccctcctgactggcctcccacttccactcttgcccctccactcaattcttctctgttctgcagcccaagtgaccctctcaaaatgtaaatctgatcatgtcactctcctccttagtgctccctagtgactctccagagcttttggaatgaaaagcaaaattcctgtcatggtccacaaagccctgcctagtctggctcctgccaacctatttccccacaatccagccacgttggctctctcctcctgtgtttcctgccaccacgtggcctttgcacttgcggtttcctcttactggaatttcctcccgccctccctgcttgcttcagtctggttaactcctacrtatttatcctctatatctctgcttgcccgactcctttttggaggagcttttcctgatcctctaggtcaaggggagctcccaacatctccccattagtgccatgctcctttccttccttgcatttgtcagttttaatttccactcctatgagtgatcactgggttaatgctttctcccgccacccacccgtctacaatctccatgaggttagaatctgtttctcatttgttcatccttgtgtccccagtgcccagcctatttcctgaacatagtagaggttcaaaacatatttggaaaatacatgaatactcacattttgcttttcagacttttcctcctagaatatcattcacctgattcgggtgtggggtgtggtctctgtcaaagatgcactaatgattgttccttgcccgtacaattctcacagtgacctccacgcttacttagccttgatttccttgacctgttttgatggttctttctcaggagagcctgcaggaacttctgaggatggggctttggggatgtgaggacaatgraaaacagcttgtcagggagatwctgatgcactgccagccttgctgagacagggcaggaggaaccgcctctaaatctcaggatagttcacctggaatgtgggaagacattctcagaaagggttcttcccggggccctcctcttcatcctttcttgcctccctcccttcctccccatacccctcaggcttttatagatgcatatttacagaggacagggctacctttttttgcatattgattcttttgaaagggcagacctttagaactaaagaaatgaccacaccgctgttagctttctgcaaaacagcatagcactttcccggtgtgtgtttattacctaccccatgagctaaacatgaggcaaagtagtaattggctgggtctctggtgagtccatttccctgcgttgccccgaggtgtatgcaggctttacacagctaccttggcaactgacttccccaatgtttgctgtgtgtccaaggacaagcagggatctatgacactgggtgtttctagcaaatttccctctcaaattggcacattctctgtgagctttggagacttcacagtgtggctcacagtttgggaacaatttgcatcatcatctgactggtaagttcyagttctgtggtaactcaagtgtttcaaatagcttaatacgcaatagggcacggaggttcgttctgcttctgttggaatcaaacacacatttccacaatgttcccgttatacaggatcatcccgaaacacatcccccagaacactatgttgtcactactctaccttttgatatacactttattattattcctatgtgcagataggttacttaagtttttctgttctagattagtttgtctattcaaatacatgtttctcacacacttctacagtgtttttctttttgttgttattcttaaagtgttctatgaaaacttccatgttgtatcaaggctgggtggtagctttgtaactagtttcccaccttagaatgactgtctgctttgtccaggactgcaagggggacttagaatatgggatttttcagtgctaaaactagaaaagtctgagacaaatcaggacaaagtggtcaccctgctaccatttctagccttgataaaggagcaggtagacccaaccaaggataatttttgttttctatgtagataccagtttagtggttggtaggaattcccccaaatcaacaccttgctaagctcatctctctctctctctctcttttaatatracagcttattgagataaaactcacataccatacaattaatgcacccatttaaattgcgaaattcagtagtttttagtatactttcagagttgtgcaaccttcatcacaatcaattttacaacattttcataattctcaaaagaaatcctgtacccattagcagccactcccatttctctccaaatccctcagctcctggcaaccactggtctgctttcagtctctgtagctttgccttttctggacatttcatataaatggaatcatacaatatgtggccttttggttctggcttttttcatttagcctgtgtctagaaggtccatccatgttgtagcatgtgtcagaatttcatttctttttgttgccaaataatattccattatatgtatatatcacattttatttacctattcagaagttgacggttgcattgtttgcaccttttagctgtttataaacattcattacaagtttttgtatgkatatatgttttcatttctcttgggtatatacctagacagatttcctgggtcatgtggtaactctatatttaaccttttaaggaactgccagactgttttccaaagtaactggactattttacattgtcagcagcagtgtatgtaggttccagtttctgcaaatccttgccaacacttggtattatctgtcttttttattatagccgtcatagtgatgtgaagtggtatctcatggttttgatttgcatttctctgatgactgacaatgttgagcatcttttcatctgctaattgctaagctccttaaatggaaaattataggaagcataaagcatgtttgcaaagaagtgattatattcgctaggattaagattttaagtgaatatttaagatgcccatgactagtgtccactctctcgaatcaagttttatttaaaccattgacttttcctcataactggaaatggtcccagtgaaagtctccctcacttgctggaatgtggggccatctctgctgtctgtcaagccttgatgcccaagtggccattttctcctggagtctgcatcagatggtagagtgtgtgtttcctgagtgtgagactggatctgctccacaatgctttgctggttaactccttccaagagtgcaatacccaggggtcactcctactcttagtgctctggggcctgggcccttaacacactcaatgtttcttccccttttctcacttatctgatcttctgctacttctttctcctttgtccgcccctgctctctggtttctcttgtacmctctgtttatttaattttgatcatttgtttgtttgttcctttcttcctcctttaacaaattcaaataggatacaagccactctgtcccatctcctgcccttgccttctcttctttcattcttttattaactgatttttctcttgagaaatcaccactgggtcaggtgtggtggtggctcatgcctgcaattccagcagtttgagaggctgaggcaggaggatcacttgaggccagaagttcgagaccagcctgggcaacatagggagaccctgtctctataaaacataaaaaaattagcctggtatggtggtgcaagcctgtaatcccagtgctttgggaggctgaggtggggaggatcccttgagcccaggagtttgaggctgcagtgagctgtgatggcgccactgcgctccatcctgtgcaacagaacaggaccctgtctctagaaacaaaacaaaacaaaaaacccaaaacatgccattgatttggcagaaaaggacagggttcctggcaaggctaccaaaaacatgatctctgtcagaaaacatactatctgcaatatttgttggaatctgagaatgggaaatgtagctttcttctctccaggagtgccctgttcacagctgtgggataatgatcaatagttcctaaaaatatctatggaagacctcaccactcttattgatcagcaactactgcaaagataatgtttcagcatttgaaaccccttattattaatacttattctgtatgggtcaagtagccgctaacttacagtttggcagatggatcaagtataataataataacctataaatactaataaatgagccagtatagtataagtgagtactatactaagcagtgaaggaagaataatttcatggagggaagtccayggtagaagcaggctgctaggtattattatcgttttcacatactattcactttatgaagagatttaacatagctcagggtaatatggtctcattcaaatgycaaaatgacccctcagttcttctttctctcctttcccgatagaggtggccctaaggacacacrtctgggacaatacggccatttttagccttgacccaagagatctgggttccccatgactggagtggaaaacaatgtctgtgggtttgtgtttttcagagtcaagggtccagagaaggaggagaagttgagacaggcggtcaagcaggtgctgaagtgtgatgtgactcagagccagccactgggggccgtccccttacccccggctgactgcgtgctcagcacactgtgtctggatgccgcctgcccagacctccccacctactgcagggcgctcaggaacctcggcagcctactgaagccagggggcttcctggtgatcatggatgcgctcaagagcagctactacatgattggtgagcagaagttctccagcctccccctgggccgggaggcagtagaggctgctgtgaaagaggctggctacacaatcgaatggtttgaggtgatctcgcaaagttattcttccmccatggccaacaacgaaggacttttctccctggtggcgaggaagctgagcagacccctgtgatgcctgtgacctcaattaaagcaattcctttgacctgtccagttgactttagtccttgtttctaactgccaagtcatgtgctgagtagaggctcagtggttggggcccartggttcatctaggacgggactagagaggtcagtctacaagcaatccattgaccacttacttggtgctgcacacaaatgttggtgctatgggacccaaagatgagcaattagtattccagtcttcattgcctgtrcttacaaaagaagacctcacttccctaaacatctagttatggcggctcaagcccgtacctgcctacagagaagtgtctgcagttactcactattagtttcctaagggggcactgctggctccttctctcccaggaatgggcttctcctattctttaactcttgccttctccctggagaggctaccaaaccctggcctctgccgctgttcaggctgccatgtgggtatagctgtttgctagactccactctggcctcaggggccagagaacagctgtccagcatttctgttcatcccagcaatccaaaaaaaaatttttttaagctacaaagatcactccattttcaaattcagactctgccacttattagctgtttctcattaggcaagttatataaccttgcagtgcctcactttcctcatctataaaatgagattaaaatagtctttttattaagagaattaaagtgaattgtggccaggcactgtggctcatgcctgtaatcccagcgctttgggaggctgaggcagacagattgcttgagctcagaagttcgagactggcctggggaacatgcaaaaaccctgtctgtattaaaaatacaaaaaaattagctaggtgtggcggcatatgcctgtggtcccagctactcaggaggctgaagtgggaggatggcttgagcccgggaggcggaggttgcaatgaactgagatcgcaccactgtgttccagacagagtgcgatgctgtctcgaaaaaagtaaaataataaataaataataaataaaataaaataaagtgaattgttacatgtaaaggacctagaatattgcatggtgcttgataaacattcagtaaatgttagttacaatcattattattatacgcatcatcgttaatattagttgccaaagcagctgagaaaagatggcttattctccaatcaggagagaggattcctgttctcggctacaggcactggactctttactggcattgcctttgagagaggctgtgatacaactcagtttctataccacatgctgccaattcctttttgatttaagaaatctctagcaaacatttagcactctccaagcatctttctttcatgcaccaggcacaagaatgaaaatgaaatcccagtgtcagctgactcaacagccctcatcttcatagtcccagaaacaccctaagtgctcccaggtccttccaagggcagtagtgtacctgcaccagcagtccctacccagaatctccctgttgaggctctcctgctcaggctgtgatgctggggcccctgagcccagcctgaggatgctggaaagggaccaatatgccctcttttgagaaggatactgcccatgcctaacactctgctttagatgcctcagagccatcctggtttcctcccagagtggtaagaaacacttttcatttattccagggattggtaaacttttcctgtcaaggcccagatagcaaatatttctggctttgtgggttatacagtcttaattgcagctactcaactctgcagttgtagcagaagcagctatagacagtatgtaacaaatgtgcgtgtttgtgttccaataaaactttatttataaaaacagatggatggatagattaggcccaagggttgtagtttgtagacccctgatctagacccttaagtagccttgtttgtgcctgaagtttacagatgatccccaacttatttttattttatttttttgagatggagtctctctctggagcccaggttggagtacagtggcaagatcttggctcactgcaacctccacattccgggttcaagtaattctcccgcctcagcttcctgagtagctgggattacaggcgtgtgccaccatgcccagctaatttttgtattttgtatgttagccatgttggcaaggctggcctcaacctcctgacctcaagtgatctgcccacctcagcctcccaaagtgctgggattacaggagtgagccaccatgcccgaaccccaacttatgtttgacttacaatgtttggactttatgatggtgcaaatgttatatgcattcagtagaaactgtacttcaaattttgaattttgatcttttatttttattgttacaaaattggctttgtgtttgatgatgttgcccagtttttggctaatgaaagagttctgagcatatttaaggtaggctaggctaaactatgatgtttgatacattaggtgcattaaatttattttggacttatgatattctcaacttatgatgggttattgggctgttacctcatcatctgccgaggaccatctgtatacattttcttgtgaacagtctggtcagtttcttcttataggagctcaaggcaagtccaaggggctggacaaaaaataggcagaatatggtttcttctgtgctccatccctgctgtagcactctctttcttgctcaatctcccaatcaaaactcctccttccaaatggcatgaacccaggaggcagagcttgcagtgagccgagatcgcaccacaacactccagcctgggcttgggtgacaaagcgagactccatctcaaaaaaaaaacaaaacaaaaaaaagaaactcctccttcctcccctagtttgaagcattcaataaatacaaacagaaaatcagaaaacaagggtggtrggggatggcagatgaagtgttacctacactaatatttctcaaactgcaagttgccattcatcaatgtatcataaaatcaatttggtgcaccaaatccacattttaaaaatgaatagagaataaactagaaaacagaatctcagatattagcactgcatgtggtatattattttgggaaatttcgtttccattttacagacatctgtctatctgcacacatgtgcatatttgttactggatcatgatataacatgcatttgttactctagtttgtgatttttaaaacgtttgaaagccactgggctgttctttgggctctgggactctgctctgataaccaacatttttctttcccacggagatgaaagacatagcccctgttcttaaagaactgcaagtcatggggagaaatcgacatgcaaacagttaagacacagcaagacaagggctctgagatgtgtaagcacagggtgctaagggggaggatgggaagaaaggtggcatttgctctgggccttgcagactgaataggggtgtgtttggcaaccgagaggaaaagggcagtctagggaacaacgtgtacgaagacatgaaatgactcctcctcctggtagcagcctcctcacaggtctgttctccgacggaagccgggacctaagtaaatatttggcttctggtttttcatttgctttccttgaaatcaaacagaccgaccaagtcatgagcaaacaaggactagggtcattctggtcctaacttgtaaatctctttgaccgctgacccagctccrgttttttaaggtcctactttctggggaaatgttcaacagtctcactttaagcaaacctttgtgatgcaggaagctgcaagtctctctgtaacatcctggggagagagtggggagaagaaagctattaaaaaggtcgttaacccatttggtgtcatgcagctcagtcttcgtgattcccatcatctggctgtcaaaagtaataaaagatgtccatggtacaacttactaggctgagctttaaaagctataactgccccctctaattttagtctcagccaactcggagaatacgaggcaaccaataaatcttatggaggctcagagaacatggaacaaacataggactaagggacagaaaacatgtgtgaatcttagcttgatcacttgattgttgtaagagcatcattccagctttctcaggcttgggacccttctggaaaacagggataatcatcatttctcaggactgcactgagatcaagtgaggtacctgtgaaggcattttgtaacctgttaagtgacaaatattagataactctgatagtattaacccattctaggacagccattaagccacatgttgctgcattcatgaacagttccttagtaagaaaataaatcattctaccaaaaagacatatgcacccacatgttcatcacagcactactcacagtagcaagagatggaatccagtaggcacctatcaatggtggatcggataaaggaaatgtggtacatttataccatggaatactatatggccataaaaaatgaaatcatgtcctttgcaccaacatggatgcagctggaggtcattctcctcagtgcagtagccagaaacagaaagccaaataccacatgttctcatgtataagtagaagctaaacatggggtcaacatggacacaaagatgggaacaatagacagtggggactacaaaaggggggacgagggagaggggcaaaggttgaaaaactacctattgtactgtgatcactacccgggtgatgggttcaatcacaccccaaacctcagcatcacacgatatatccatttaaaaagcctgcacatatatcccctgaatctaaaattaaaattgaaagaaaaaaaaatcttaacactgaaaaaactttcttaatgaactgagtatggccttcaaaacctgtcttgcatatgctttctatgcaagtcagcaccataggcaccttgaatccagagccttcttcatagttgcttattcattcagaagatgtttcttgcatccctgttatgtgctaggcattgggcctgagatgaggatcctacagtgaagatgacgcagtctctggcctcgtgggacttatttccctgcaaggaagaccagaaagaaatgcactctgacacagcctgagcagaaatgctagattttttttttggtactcaagtcagctaggcaggaccttttgcccacccaaatgagacaaaccaggcccttcttacagctgtaccttctcatgtatagatcagcttcactcaaaaaaaaatgttgagctaggattatgtgtttaaggaatattatcacaaagaaaaacaccattgtgagtaaagtcactgaagctttctgtttcatatcttccaatgaaagcagggatttaaactttctgagtctagccctctcgtctcccttgctggccagtttcacactgaaaggagatgctttccttggcctttcaaacgctttccttggccctctgagcgccagcagagggtgcacgtggctcttgttgaagcccttcattcctgaatttgaccatttacacatgaaggaatttaaattgagttaaaccttcccaaacaagacgcttctctgcagtgtctcctttttcacagtctacttatgaggctgctaggaaaagagaaagaggaattcagcatatttttctttaacaaaaaatatggataattatttttatggatacacacatttaaaaatttcccttttaggtctatacacaaaatgcaaattttaataaactgtaragaggatcttggccagaatagcatgagaaatgataactattagattatgcagttaactcaccatcaccttctatttgctgtttattcaaagaagagaaagaaggtttttgtgctttttcaaaccctagttttttaatatttagaaaatgaagaagtctttctatggctgtggttgccggccaaacctctatgcttatcactttaatttgtactttaatagtgtctgatgaattcaggggaagggttgaggttgaatttcaaactctcaacaactaattgtgagttattattgcctttgtttggacttcaatattgaaagccaggaagtagtttctttcctggtaggttattgtctctcttcctttcagagaaaagcttttgaatgtttaaacagaagaggagttaaagaattgtaaacaccagttaggctgctcttcagaaagatctgtaatagcgaccaggtgcagtggctcacccgtgtaatcccagcactttgggaggccgtggtgggtggatcatttgaggtcaggtgttggagaccagcctgaccaacatggtgaaaccctgtctctactaaaaatacaaaaaaattagctgggcgtggtggtgcatgcctgttatcccagctacttgggaggctgaggcaggaaaactgcttgaacccaggagatggaggttgcagcgagccaagatcacaccactgtactccagcctgggagacagagcaagactctgtctcaaaaggaaaaaaaaaaaaagcatcagtaataacaactcactttgaagccttccacctaagcgactggtatttttcttaagagcaggtatgtaaacacttcatttgcatgaggaggagaaagaggtttctagaaaggggagggtaagcagttagtttattgctcctttacctctcaagggtccatttctggccccttctcactgctgtctaatatttgttaaatgctatagaaatcccagtcgttggtcaggcacagtggctcagcactttgggaagccatggcaggaggatcacttgaatccaggagttcgagaccagcctgggcaacagagcaagaacccgtctctacaaaaatatttaaaaaaaaaaaaaaagaaagaaacctcatttgtttaatatgaccttkgcccttgcagaatttataatcttgcttgtgagttaacatttacaaaattaccaatcaaatccttttattttagaggtgaagatatggagactctaagggggcaaggagctttgcctttctgtgccttagtctactgtaaattgaaaagttgaattacatatctgtgaagtccagtgttttat

SEQ ID NO: 95865 - DNA, 33656 bp, Homo sapiens
  misc_feature (1)...(33656): n = A,T,C or G
cacgatctcggctcactgcaacctccgcctctcaggttcaagcgattctcctgcctcagccccccaagtagctggggttacaggtgcctgccaccatgcccagctaatttttgtgtttttagtagagatggggtttcatcatgttgaccaggctggtctcgaactcctgacctcaggggatctgcccgcctcagcctcccaaagtgctgggattacaggcgtgggccgctgcgcccagccaacatattatttttcaatattgagccttagctgactttcacagctccgtgagcctaatggctttttacgtctttgcttctgggctaatttgaatagtcctgaccccctggcttggtaagctgaatgggcctggtcctcctccatccctcttctggtattttctgttccccccactcccctgtacccagtttttcaggcacccagtgtcctctggcctcagccccycagctctcaagatcctcgcagaggctcccctccagatctcatgccacatccagagaattgtcaatctcctctccagacaactgtaaatgtgccaggcccaggtgacattccttcagcgggacagttagccaaatgtaaatgggcaataatgctttgaagtatcctcctgccttcaactcaagcttctagggctttaatttgaatagctgtcgctattctagggttgaggagaggctcttggaatctcagaaccactcccaaaatgattacctgctctgcctctgattcctgtccagaggaataaagatgaatagtgacgaacgagtgtagaatagtaatttctactagagccatgtagagatgggcgctgggaggctgtgaaaatcctgcaagacaagctctgcctttaagaacttaaatgtggttgggaagataagacactgccaacctcaaataatgagactcagaaaatacagtgaagtatagagtttattcaagcccaaagcttgaggatggccacctgggaacaatccattcaagttgcccttatcatacactctgattgacgtcagttacaagtgggttttttttgttttgtttttgtttttgtttttgttttttgagacagaatcttgctctgttgcccaggctggagtgcagcagcgtgatctctactcactgcaacctccacctcctgagttcaagagattctcctgccttagcctccagtgtagctgggattacaggtgcatgccaccactcctggctaatttttgtattttcagtagagacgggatttcaccatgttggccaggctggtctcgaacacatgacctcaagtgatcggccgccttggcctcccaaagtgctgagattacaggcgcgagccaccgtgcccagccccaagtgggtttttaaggaaaaaagaaaaggcaattcctaaattgtttaccaagaatttacattaaaataagctactgattgtctatacattgttttttgtaacttaaattccaggaacatgagatgagtgtgttaggtagtcaggaacaaaaatgcctttaaacatctacccccgggcatgagttttgggggttgtaactgatgtctggtgttggtgtttctctggcctgattttgcaaaccttgaatacctgctacgagtgagttttcatttcattttttttttttttttgagacagagtttcactcctgttgccaaggctggaatgcaatggcgtgatcttggctcactgcaacctctgcctcccgggttcaagcgattctcctgcctcagcctctcgagtagctgggactacaggcatgcgccaccatgcctggctaattttgtatttttagtagaaacggggtttccccatgttggtcagtctggtctcaaactcccgacctcaggtaatcctcccacctcggcctcccaaagtattgggattataggtgtgagccactgcgcccagatgagtgagttttcttttctcaaattgatagagctagagagccagagagatattgtaggttaaaaaacgaccgcaggccaggcatggtggctcacacctgtaattctagcactttggggggccgaggccggaggattgcttgagcccaggagtttgagaccagcctgagcgagatgtcgagaccctgtctctatgtgtatttttaaattaaaaaaagaaaaaagactgcaggccagcctgacgtggacaggaagtgctcaggaagaggacgaggccccttcagtctcagtcgtcagggagggtctcacctgggggacgggaaggggttgcagcctgagttcgtaggtggagcttggctccgggagagaaaaattaatactcccgtcaggcacagcctcatatgaggacccatagacgaacggcaacatttctgagtctctgtctatcattcccagttcagaacgtttaccatcgatcactctcccactgtcctcgatgccttgcttaacttgctccttccagatccctgcctttctggacttaaaggaggtttgctctccaccagacctaaatacctgtcctgacttggtgcactgggagcaggaaggatgcgttacacatgttgcccagacttctgctgcgaagacatctttttagggtgaatgtaatctgggaaacaaaatttctcctgcaggttaaaaatcaccaaacacttattttctctgtgtcgttatcagttttcctccttggctgtcagcttggattttcctttttaatcatttgaagcccaggtatatgcagactatactaataagaagtcaggacgagtgggacaataaaggaagcaacgcaaagcaagagatctgcatagcccacgcgttgtttttctggccactaaatactagagagttgtctgtataagaaaatcaatgattctttccttttttaaaatacagttgcagcttttttagatgaccaatgtcgcaagatttttgttcacatctgttaaaggagcatttctggaacttctccctccttactgaagagactcatatgggtcgggcatggtggctcatgcctgtaatcccagcactttgagaggcagaggtgggcagattgcttgagtccaggagttcaagaccagcctggacaacatggtgaaactccatctttaccaaaaagatataaaaattagctgggcgtagtggcatgcgcttgaagtcccagttactcaggaggctgagatgggtggatccaggaggtagaggttgcagtgagccatgaccatgccactgcactccagccttggcgccagagcgagactctgtctcaaaaaacaaacaaacaaacaaacaaacaaacaaaaaggactcacatggtgttgcctgatgatgtgaaacccctcgcaaggtcaggcacctgaggcactcaaaggacatttgtcgaatgaactgatgaaatgaatttaggtcttggatgtctgttatgagggccatggagttttgctcttgttgcccaggctggagtgcaatggcacaatcttggctcaccgcaacctcctcctcccgggttcaggcrattatcctgcctcagcctccgaagtagctgggattacaggcatgcgccactgtgcctggcctgagggccactctttatatcctcaggttttatggtccccatatagttaattacttgaattattaatagtttttagagactcaaaaatctttgtaatgtgcactttacctttatgtttctagattgaacaaataaaatacatacaaataaagcagctctgtttcttggttgaaaagaagcagctttcaagttcaggtctctctgtcaaggccacattatgctgaaaaacaactctagtacagagaccataaaatgttatcatgctttctggacctattgcatttttctgataagaggaaagagataaaacccagacatttccagcaacttcttgcatatgaaactccttaaagagcaccttatctgtgagcccaaagacattgtaacatactttatgttacccctggatcctgggtgtcatgtgcctctcctgaactcacctgctcctccttgacaaggcataactcgggagtcttgggctctataagagttccaagagctgggcatggccccacatacctgcccaggtttatagagcaggaccatggagaaaccattcctttctgaccccttgggcggaataacctaacttccaggaagttaatcacattgtattgggtgctgtggaggaacatgaaagaaataaaaggcaatgttctgctctcagtgagttctggagagcccatggccacaacagtctgagagagtgaccttggtatagggcagatggagcccagggggactgaatcccttttggtgtcttgctctgcacatctgcagatactggctctgctgttcacagctctgcacccatatcactttcttatccctaccatttagcatggactttactttctgcttagctaagacttatcttagccagttatgtatgttggatgtcttccaattgctcccctaccccgtctccacccttttccaccctgctgtttgtcccaggaggctgagctgtcttaaagggctcccctggcctctggcctcctaatggcttcagcccatgtggaagcctgacaggagatgctcattgtccagctccttcccatgcagttgctgatgactttggtgaccagatagcctttcccacactcctctctttgggttctggaattctggaaaccccacttggaggccgttgggcctaggatggataatggccctcgctggtgcatgagacccaggttatttctccatcccttgtggtttacttgcctacattgattgattgattggttgattaagatggtcttgctttgttgcccaggctggagtgcagtggtgcagtcataggtcactgcagcctcaacctcctgggctcaagtgatcctcccacctcagcctttggagtagctgggaacataggtgtgccaccacaccagattaatttttatttttttttgtggagacggggtctcactgtgtcgcccaggctggtctggaactcctgggatcaagcaatcctcctgcctcggtctgccaaagtgctgggattacaggcatgaaccacgggcccccaccaccacgttttaggaaatgttcacattggagtgtgccctctgtttccagctgggcccccgactggtcattgtggtctaatggagtgtggtgccggcagctgccagcgcctgccctctgagaggggtggcgaggggcacacaggaccagactgcccctactgttggatgactgggtaagtcgctttccttctctgggtctctgttttccaatatttaacatcttgttgtgggctaagtgaagtccaagtcccttccgattctaacatgaggttgtcccggaatatctattttgtgttctgaatttaataaccggctgtggagggcaccacaggcaaatctgtactgtgagtgggttgctgccactcaattatctgacagcagctgcgaacaggtgggcagtgtgttttccataggcagcgacgacttttggaggtggactcagaggcacaactaagccgcgcggcgcatcagggttcaagggcatggggctcccgcagctgtggctggggcagagctggggctggtccctccctccaggagcacagggcgggcggtccagcctcacgtctctcggcctccagccacacccggcccgcgcagtggggggcccaacagacttttccttttcgggcctcagtcttctcgtcagcaagggcggacaaggactcttctcgtcccgccagaggaggcgaccgaggggcctgagctcaggtacaggccggcgggctcaggaggcgcgagcgcggatcgaatccgcgggaggagcaaagatccttgatgcgcggccggagggcggggcggaggacgggacccacgcgattggtatcctgccctccgccccagccaatgagcggcgagggtgtcttgggggcggggcagaatcagcctttaagttgcagtgackctccggcgtcactgttgcgcttcatagacgccgcgtgtacccggttgtcctcaggcgctgtcaggtaccgtctgggcgccgctgtcctggggctctggttcgggccctggccggggttccctgacagcggcgggggaggcgggcgggcgcagggtggccgcggcccgggttcgggggatgctggctgagggggcgcgctgggcctcggccggggaacgagccccgcttcagcggcccgtttactctgcgggcggctcggacccgggcgccctggagtctccggccggcgcgcagcttcagggggcaggggcgtggcgacccacggcttgcaggccggagtcctggttccagcccagagcggccgacgggcgggcggcagggagaggctgaggatgtggcagccccgcctgccagaccgggcggagccgccgccccctgcgctcgcggcctgtggaggccaggactcggcccacccggcccagagaccccgaggcgccccggggttccgggtaggaggcctttgggcacccttggttcctggggttggcggggaggctgcgttctggggacgggggagctgtgcagtaaaccggtggccctggtcacgcggcgggggcgctgatgcagccttggagggctgggtcctcccggcctgctcctgcgccctgcagatcggcctgcccatcgctcccctcttccagcctatgattttttttctccagcctctgtcgaaataaagaaaattacggaagcagaaccttccttmcagtaacgtgcaggttaattagatggtgggggatgggggggcaacaggactttcagcatgaaaacctcccgttgggggctttttgcaaaccctgctgagcatcagtaaatgggcctggccagtgcgtttcctcgatcgccttcccgggcgggacgggaggggtcattgtccgccctttgctggcgagaggactgaggcccgaagtcacctgggcactcgccctgtgacccaccgtctccttttgtcactctacatcttaccttttcggtgttcagttttacctcttagataaattacggtgataaattaagggcgaacagacagtgactttggaatgaagtggctttaccttaagaaatgactaatgttcagtttccaaattctaaatttctccttctgggattgaaagggtttctgtggataagctagttctttcagttaaccccggaactgttctttagattgtaatcaatcgctcttagccatgtgaaataacaatagactcctttcattagaatatcctggttctgtctttagatgaatcttttcataaaaacgagcgttaaattaaaaagcttatttttagcccggcacggtggctcacacctgtgtaatcccagtattatgggaggcccaggcaggcggatcacctgaggccaggagtttgagactagcctggccaacatggtgaatccctttctctactaaaaatacaaaaattagccagacatcgtggtgcgcgcctgtaatcccagctactcgggaggctgaggcaggagaattgcttgaacccgggaggcagagcttgcagtgagttgagatcgtgccactgcactccagcctgggcgacagactccgtctcgaaaaaaaaaaaaaaaaaaaaaaaagcttatagttttgggtttacagtttttcatggtgtttaagattagttttgcatccccccccccaaagaaaaatccagtataactttaaatagtaaacatttttaaaagacatttttccctcaaagcagctgtcttaatatgtattatccccatagcgtgcctttattacagttatttgtgtgcatattttatgccctttagtgagttcttgaggacctttcaaatctcaaacatttacaaatagtgatgaatgcacgaatttggatgtgtgtggaggatgtgctgtagttgaccccggtcctttctcagtagtaaaactagttgtttgccaatgatgcacttggcttgaattttagccagaatactgattacgtcaaagagacttctgttggtagaactttttttttttttttttaaaggcctgtatttgtgaatggttacctcaggaaaagtaaatatttgtcaaaatagcaagaacaaatttactcctcaagytgaatattttaagtggcttttggacaactttacgccgactattcttttagagtaagaaaatagtttttaagagtataggctaaattaacttcaaaatgcagccttttgtggaaattctactgtaggtatgttctaatgtagatggatgggctagatggagggagtaatggtagcctgaaggaccctgttaattacgtggataaaaccttcagtgttagaattctagcttgccaagagcaatttgttctcatttccaggacctgagtatgggcgtcaggtagatgcatgatagctgcctggaacacattattttgacctttgaaggccattagatctaatgaagtaaactcttgatgaagagatgagttattctagatgaggtcagagagtgaacaccccctcttagagttagactcaacctggtcagggataggtgatcccatggtcttgatcacttgctaccttgactccctcaggagtcctaagtaagactgacctctttatctgataaaggcccacaggatgcccaacctgggctaggttctaggaatgcaaagtgaattttactgttttttaaaggagcttagagtatagacttataggcataaaaacaagtggcctgcagtgttaggacccgttacaagtctgcacagtccctgggagtctctaggagggacttaaatagtaaattctataggggagggtgaaaaaaagctaatatggatgctaattatgcatagaaaaaataaccaaatgttaatggttatcatgcaagtgtaaaattgctggtaattttcttgtctgtgttttctaattttttatcaactgaaaaatggtgtgtgtgtgtctttttaaacagttttaaaaataaatcatggcactgttgattctgatatttcagaaactggctagttttaagggcaaaagggaactgagtggccattttgtgctggatttggcmcagtaacattaacccatttcatcctcagtgacacttcaacctccttttacaaatggggagactgaagctcagaaagattgacagaatcacccagagttactcttcagaaccacagacagaatttaaaatcccggtctccaaactcgggattttccgcttgattctcccggttttgaaacctttttggaagaggctgttattgatgttggctatttttaagtccatcttaattctgctctaagatttctcatacagtgccaagcacagtaacttgaacacagaaggttctttaatagaaatgcgtttacaggattttgatacatcatggctcatccagtttytgacctttcccagttgaattaaatatccaganttcatcttaaaaaccttaagaatagctgactcaggggtgtgtgcctgtagtcccacctcttcctgaggckgaggcagaaggatcccttgagcccaggtgttcgaggccaacctgggcaacatagctgagactccatctgtaagtgaaaagaaacaaaaaccttaagaatgagtattagtaatgttttgaatgatattattttgtccccagttattctttaataaaactgcctaaacttaacaggkaaatgaatttttcatcccatttctgttggaaattagctgtgcagataacttttatataaaataagaatgttgaawttagataatctctgawawtccyttttttttttttttttttttttttttttttttttttagcgacacagtctcgctttgtagcccaggctggagtgctggtggcacagatcgtggctcactgcagcccaraactcagggctcaagagatctttccaccttagtcttagtctcctaagtaccagatactacaggtacgcatcgccacacctggctaatattcatattttttatagagatggggtctccctatgttgcccaggttgatctttaactcctgggctcaagtgatctgccttggcctcccaaagcgctgggattataggcgtgagccaccttgcctggccctagaaagttgttacggtttagagcaccactaagtattgcctgagtgttttactgctaatttgataggcaaaaattaatgttctaattttttagttgatcaaacaatttattcatactgagtaaagcataaagagtccaagaaagaaatcatacatgagtgttttagacttagcagtagtattttggggaagttacatatagtacagttagacatttttgctagcagctacctccagttggatgattcttacatcacttttgttttgattgttggtacccacccctttgagataaagtctgatgaaagttatggaccttcttcttggaaaaatatacgtctgcatgtaattctgcattttatttcaggagattttggactctctgcagactgtccctggatcttgggttaaaaatctgtattctagactgaaccgtgggaagaaaaaatagtcagtgagtctttggcaaaccggagtactggattttgtttagcaattgcaaattcctgaacatactggatttactgggtagtgccaagtttaaagggaagtaagccaaactccaagtattatgttttgctaatttggcagctcgaatcaagagtggctgtgagattatacatggtttgacttgtcattggtagacttctgttgaaacatgaattaactagtcttttagaaagtaagtatagatggaataagtatgcctagtttttggcaactttctcctaatcatgaatttatctttaagcttttttttttttttccttccagaggtgattcctatgcacatgctctaatttccttttaattattagtttctttcatagcttagtttttacttcatggcttatcaggatgcttaatggtaaattgggtacaaagaggtgtgtgaagccttgtggaggggctagttttagggctgggggtgactggggagagtagctatggctctgacttatgtgatggggcggcagggtaaacaccagcctgctcagtgatgtttagactttaacactcatacaagtaacggattgtagtttgtagtttgactctctctagtttctcagttaccttttgctaacaatagctttttcgtttgtttgtttgttttttgagacggagtttcactcttgttgctcaggctggagtgcaatgcgcagtcttggctcactgcagcctcgtcctcccaagttcaagcgattctcctgccttagcctcctgagtcgctgggattacaggcatgcaccaccacgcctggctaattttgtattttcagtagagacggggtttctccatgttggtcaggctggtctcgaactcccgattcaggtgatcgcctgcctctgccacccaaagtgctgggattataggcatgagtcaccgcacctggtcaacaatatcttttatgctacaatttttcaggataagttttgtagaaacaaccatcctagcagaatagattgttttgtttgggaatctcatatrtrtrtgtgtgtgtgtgtgtgtgtgtgtgtgtgtgtgtgtgtgtgtgtatgtatttatgtatgtatgtatatgttggtctaattcaacttgctgtgaacactttaaagctattataagttaacatttttttcctagtctttttgcctttcacctttgtttatgataaatttgacctacagaagttttagatatttgtggctaaataaaagattttaggctgggcacagtggctcacacctttaattcgaaaactttgggaggccgtggtgggcrgactgcttgagcccagagggatggacagttcctctgtctcctgccccatgcctagtctctggcagtcttctctgatttggtctccctgcctctggtctctgccctacagttgtagctgtctcatagcattgtgcctgatggtatyggactgtggtaggtgcttaacaaatacttagtgtttagcaggtactcagtcaacacacagtgcattagctctggaaagagtcttactcttattgattggttggttgattgattgcctgattgacagggtatcactctgttgcccaggctggcctcaaactcttgggctcaagtgatcctcccgcctcagcctcctgagcagctgggggctacaggcacaaaccaccacacctgactcaagattctcactctttttttttcttttatagagactatgttgcctaggctggtctttaactcctcggctcaagcgatcctcccatcttggcctcccaaggtgctggaattacagatgtgagctatcacgcctggccattttttttttcttgagactgggcctttctttgtctcccaggttggagtacagtggcacaatctcagctcactgcagcctcaacttccgggctcaagcaatcctcccacctcagtctcctgagtagctgggactgcagatgcataccactacacccagctaatttttcaattttttttagtgatggagtcttgctctgttgcccaggctggtctcaaactcctgggctcacgtgatcctttgrcctcagcctcccaaagtgctgagattataggcataagccaaggattctcactcttaatgcattctcttttctttggacagatctgtggtttttctacttgaaggacacaatrttttccaaactagcacatttgcagaggtttgctgtacttagtcgcggagttcattcttcagtggcttctgctacatctgttgcaactaaaaaaacagtccaaggccctccaacctctgatgacatttttgaaagggaatataagtatggtgcacacaactaccatcctttacctgtagcccyggagagaggaaaaggtacgtttcaaattaatcygtcttttcccttttcttgaaaccttttataaaaaaaaattgcttccatattttcacaatatacatttttctagatgtgtttaatgtgtatattgcagacatggttaattcttcttcttctttttttttttttttttgagacggagtctcactctgtcacccaggctggagtacagtggcacaatcccagctcactgcaacctctgcctcccaggttcaagcgattcttctgcctcagcctcctgagtagctgggactacaggcgtgcgccaccacacccagctaatttttgtatttttagtagagatggggtttcaccatgttggccaggctggtctcagactcctgactttgtgatcctcccaccttggcctcccaaagtgctgggattacaggtgtgagccaccacgcctggccagttaattcatttattgagtgtctagtgctgctgtgttaggtgctatggaggcttcaaagaggaaccattgtctttgtcatgtagaccttaccaagagggaatgcaagagaaataaggaaagtactatcatattgctgtcatttttttcttttaacttttattttggcatagttttagacttaagaaaagttgtaacaaatagtactgacattttccttttatacttctcccagattttccaagtgctaactttttgctgctttggtcttagtgtgttcactcccttctcttctccccccgccgcctgcatattctacattgttttctgaactgttttgagaggaagttgcagacatgacatctcttcttttttttttttttttttttttttttttttgagacggaatgttgctttgtcacccaggctggagtgcaatggtgggatctcggctcactgcaacctctacctctcggtttcaagtgattctcttgcctcagcctcccgaggagctgggactacaggcccacgccaccacgtccagctaatttttgtatttttagtagagacagggtttcatcatgttggccgggctggtctcgaactcctgacctcaggtgatccacccacctcagcctcccaaagtgctggattacaggcgtgagccaccgcgccccgccacatgacatctctttacccataaatacttagtgtgtctttccaaaaacgcaatgactttttgagatagggtctcattctgttgcccaggctggagttcagtggtgtgatcatggctcactgcagcctggaactcccggcttcaggtgattttcccacctcagcttcccaagtagctgggactacaggtgtgccttaccatgcctggcttattttttgtagagattagattttgctatgttgcccagggtgatcttgaactcctggtctcaagtgatcctaccactcagcctcccacagtgctgggattgcaggtgtgagctactgtgcccagctgactttctcttttataaccatagagtaattgtaaaaatcaagaacttaacactggtacagcaccattagtctagagacctaatccagatgtcatttgttctcttttataacaaaagaaaaacctccgatgagttgcattcagttgtcatgtttagtcttctttaacccagaacagttcctcaatccttggttgtcttggtcttctttccctttgtattaagtatcttgtggggacagagtgtaaaactctgtaaatatccagttactcatgaacttttactcacaatttcagcatccactaatgattcttgcctgaataaatgattacggtggtagttgccaaatggtgatttaatctayaatttggaataaataacagccttaaccaaataaaaccaaagtttattacttagctttgtaccagaaaatgacaatataagagtatcacacattttggtcatttgcttgtattttatttggtaccagtactgtagacatatcttcttttgaactattgaaaatctgtttcatattacatgacatggcaaccttgtttttactttcccactagcaatgtatgagagtgccaatttcttcagatccttgtcaaaagttgtttttttaattataaccatcccagggagtatgagatggtatctcattgtggttttaacttgcattttcctaatgattagtgatgttgaacatcttttcatgtgtttcttgccatttgtatatcytctttgaagaaatagctattcaagtctttccccattttttaaattgggttgtttgtccttttgaaattgagttgtaagaattctggatattagatccttatcagacacatgatttacaaatattttttttccatcctaagggttattacagtctacttctcatgatttttgtytgttatgtgtaacttctgcttttttatttttaaattttatttattttattttattttttttataggcaggattttgctctggtgcccaggctggagtgcagtggcacaatctcaactcactgmatcctctacctcccaggctcaagcaatcctcccacctcagcctctgtaacgggaccatacgcgcgcactaccatgcccagcatttttctgtagcgtcagggattttgccgtgttgtccaggctgatctggaactcctgggctcaagcaatccctgccttggtctcccaaagtgctaggattacaggcgtgagccacggctccctgcctaacttctgcttttaaattctaattttggatcctaaatcttagaattaggtaaaggttttactccagagtttataacctttttgtgttatttttgttaaatgtgtgttttgaagctgggcagataaaatacaattcttagtaattccttacaaaccaaagtttattatgcctgagctaaaacaagctttaactacaaatatgtattaaatagaggttcatatataggcattcagagggcttgctagcactcttaatttttggactttatgycgtatagtaattgtctaaaattattttcctttcttaygtattttaggtatttacttatgggatgtagaaggcagaaaatattttgacttcctgagttcttacagtgctgtcaamsaagggcattktcaccccaagattgtgaatgctctgaagagtcaagtggacaaattgaccttaacatctagagctttctataataacgtacttggtgaatatgaggagtatattactaaacttttcaactaccacaaagttcttcctatgaatacaggtaaaacatttcctttttttgttaaataccctcaaaaataatctttttattttytgatagtttaacattttaaaaaaatctgaacatttttctctcctgataggagtggaggctggagagactgcctgtaaactagctyktaagtggggctataccgtgaagggcattcagaaatacaaagcaaagattgtttttgcaggtatgtgaaattaaatattaacttctatgattgaaacatacaatataatttactgtggccaggcatggtggctcatgcctgtaatcctagcattttgggaggccaaggcaggaggagtctttgagccctggagttcaagacmagccttctgggcaacatagggagaccctgtctctatttaaaaaaaaaaaaaaaatatatatatatatatatatatatatayacacacacacacacacacacacacacacttatatattttatatataaaaaacatatatatatgtgtaaatttactgttttaatttgctgatgaaatacttgtaatatgttttgcctggtacatgatacgtatttgctgaatgtttcatwaaaatttwtgagggatttcctcttcttgggattatttcttcatatatgagatttttctttctgaactccatattcctctcatttgcctgtcagatttttttcatagcagttatccagttaattagatagtctcactggtggagggtttgtgttgggtgctggggttgggtgaagttagtgtggggccatggcctacatagactgtggtttgaatcttgatattggaggtcctgttgtgccatgttccwcttagaagctgttgaaaagaggaggcttggagttgcccttgttaggtttctgggactggatgaaaggaataacttgaattttggttagggagactagcaattarttgagaagatgtagtttgactgttgggttctttatatgatattcaaatgagaggttctgacttgttttttaagctttatttttttaaaaaacaagtatgtgtacatttgtcactataatggtcaaagttcattcttgtgatagttgaaatcattaaatattctgccttgtgaacacatgcagttaaatgataaaccccataacataatagaatccagagttcaaccgaaggccagaggtgattggtatttgaggggacagattggtattcccaaagaagaaatcttagcaaaactctgtaacttgccatttaaaaatcttgtgctttcgttgtaggacaacataactgtctcttgcaaacaaaaatggtgtttctggtgattttcattcttatagactgtgtccagtctctttcttaatagcaaagggtgcaaagatgttttcacctgagtattgaaagaagctggtgagtcagtggggtggagagacagaggaagactgtccctaactgtaagtcccttatacctgcagggtaagtgactgaggatgaggttcctgaggctaggcaggggagagcaaataggcttatggtctaatcagtgcatttcttcttaaacaaacctagtcaaaatcaatgtgctattttttgtggacaagtgaaagaagagattacttgtgggtaagggatgctggtgaaagaggctttgcaagaatagtatttagaaacgagatgaagccaaaatacgataatccagcactgattaatrgagttgctgctggcagaagtggtgagaagataaaaacatgatgtcacaaactcccaacctctctgttattttacatggtgtctttccttcttgaatgtcatcctctctgaaattatctagctcacttgctttactggtttatgtcaggtgttttctccctgctagaaaggaagctccctgaggatagggatcttgccagttgtgatcatgatctatttcccaacttttttttttttttttttttgagacrgagtttcactcttgtcacctagtctgcagtctggctcactgtaacctctgcctccagggttcaagtgattctcctgcctcagcctcctgtgtagctgggattacaggcgcccaccaccacgcccagctaatttttgtatttttagtagagacagggttttgccatgttaaccaggctggtcttgaactcctgacctcatgtgttctgcctgcctcggcctcccaaagtgctgggattgcaggcgtgagccactgcacccggcttccccaacatctttattattattattattattatttttattttttgagacagtcttgctctgtcacccaggccggaatgcagtggtgcgatctcagctcacagcaacctctgcttcctgggttcaagcgattcttgtgtcttagcctgctgagtagctgggactacaggtgtgcactaccatgcctggctaatttttgtatttttagtagagatggggtttcaccatgttggccaggctggtcttgaactcctgacctcaggcgatctgcccaccttggcctcccaaagtgcagggattacataagtgagccactgtgcctggtctattccccaacatctaaaacaatgcctgacatagtagatcctcagtcacctttattaatggataaaaaatattccagcagaaagggagacgtctgtcatttagcatcataaaggattataatatcaaggaaggtaaaatggaaacgtgtttggattgcttgaggatcttttctccaaatgaaattggaaatgcattctgttgttagcctgcagtattggagttttgaaaggaaaaccgctaattgtctatgaaggatattctttctcatatcactatcataaatgcaccttctctagaaaacatgcattcaagacctcaattgttagggcttggttttgggttggggattattgaaagaaaagtaagttatctatcttcaggggctatatattccagtcaagaggctcagtagagagaaatgcctaaaataggaattacaaggccagacttagtggccttgtgtcataggagccatggtgtttaatatcagactttgttttaacaattgaaagcccaccgaaggtgcactaaagcaagcccttgatttattttttgagtcaaacttcttgtggtgttttgcggggatagtgcttattgaattttgggtttctttgaaataatcactgtttgtttcccctttgtagctgggaacttctgrggtasgacgttgtctgctatctccagttccacagacccaaccagttacgatggttttggacmatttatgccgggattcgacatcattccctawaatgatctgcccgcactggaggtatttcactagcrtcatagtgctcagctcattgggaatagaaattaaagctgttgaatatatgaattaaaagtacattatatgacagtaatgcaaatttatctcacttaagttaagccacgatttcagacttgttctcagtagcgatcaattagtttccaacacagagaaagctgagttctgtgatctactctgtacagccagccaactactttagatgtgtgtccttcataacagttaacttcggtatacctgcttacttactaggtaaaatttctgtttttagctagctttttaaaattatgaagtggaagactttttaagaaagccttaagttggctttaaaaggctatttactttagatttaatttaagtaattaatttctttttttgagacagagtctcactctgtcacctaggctggagcgcagtggcacaatctcgtctcactgcaaactccgcttcctgggttcaagtgatcctcctgcctcagcctcccaagtagctggaaccacaggcacacaccaccacacccaactaacttttctattttctttagagacatggtttcgccacgttggccaggctggtctcgaacacttgacctcaagtgatctgcccaccttggcctcccaaggtgctggggtgacaggcatgagccactgtgcccagccagatttaatttaggtacatttgtgtattagaaaacaggctgggcatggtggtacatgcctgtaatcccagtgctttgggaggccagggctggaggagcactttgtgttcaggagttcaagaccagcctgggcagcatagggagagcctgtctctacaaaaaaatttaaaaatcaaggtcaggcgcggtgactcacgcctgtaatcgcagcactttgggaggccgaggcaggcagattgcttgaggtcaggagtcgagaccagcctggccaacagtgaaaccagagacagtggtgaaaccctgtctctactaaaaatacaaaaaaaaattagctgggcgtggtgctgtgcgcctgtaatcccagctacttgggaggctgaggcaggagaattgctggaacccaggaggcagaggctgcagtaagccaagatcgtgccactgcactccagcctgggtgacagagtgagactccatctccaaaaaaaaaaaaaatgaaaataaataaaaaattagctgggcatggtgcgcagctacttggcaggctgaggcaggaggatcaccttgagcccaggagttcgagactttagtgggccatgtttgtgctgctatactccagcctgggcaacagaatgaggcaaaaaaggaaatgtaggctagtgtaacttaaaggtgaggtatttggagcttctgataattgaatggcagtgaatttgaagtcagaatttaygttagtgcgaaaacttgatttgcatacttaatgtaaaatatgtgtggtatatgctttcagatttccaagtgtggtagaaaggaagttattaaaacttattcctgtttcttctgtagcgtgctcttcaggatccaaatgtggctgcgttcatggtagaaccaattcrgggtgaagcaggcgttgttgttcyggatccaggttrcctaatgggagtgcsagagctctgcaccaggcaccaggttgtcacgttagctgtttgtgataaggctgaatgtcgagttagctgtttgtgatgaggctgaatgggctcctccccaactcctctctgaattctgctgattggataaatgcaaagattaaattactttccactagagggcgatggcattctaagagcttaagtacttcctagtgcttagaaacctgcacagaagcagactttttcctgtctctggccttgtcctgggccctgtgcagaactgcagacctggtcttaacagcgtttccttcctcgctgctctaagagcctttcactctgagcccccgcaagccctttgttgtattctctcctcctttcccccagggctaatagtagtatattttgtttaccatttgagagtttctgtcacatattaaatgcttgtggaataaacaaatgaattaatttsttcccagagggtagttaggtccagaaaagccatacaaaaccctcacctttgcatcagcaccttttcactatgtagagcagggcagaatgggcctctagggagatagtggcctgacaaaggaaakagttggtgagtstacaagattcttataggatactcttgaaattgtgtgyagttaaaacatttttacaaatttgagggcacatcagaattacacatttattgttggtggggggacagtgaaataaggatggctattttccctgtggaaacraaagtgatcactaataggggtattttttttccccaataggttctctttattgctgatgaaatacagacaggattggccaraactggtagatgrctggctgttgattatgaaaatgtcagacctgatatagtcctccttggaaaggccctttctgggggcttataccctgtaagtttcatgttccccctctttccatttcctactcttgtaaaatatacccctaaagtatttatacatcaactgattgtgacaacaatgctttcagattgtttgattttaccaagtgtgctgcaggccacccggaatatctgtaataaaaacatttaagggaccagtgtgtgacccacttacttattgcctgaagaattgagtgtgccttggaatttgctatgacattggatttgggtggaaacagtttacccccaaaggactcctgtagactcctgtccttttttccagtgttcagaaacatggcatattactaattgtttaaaaccatgactggtgaacaaagagactgagaaaaattaatgtttgttgtagttcatgtcttgggtttgcctttcagagccagtaattgttactacatcagaggtctctgaagtatagatgtttttgctgaatagacaaaacttttgctaaaaagaatgctcagctttgttttttaagcatttaaacaaagcatttcatctcgacgttggaagtgattgtgaaattatatcattgcagaaatagcttttctcttttagttgcaaaattatattgttttgtgccattgaagtgtacctaaagtatttgtaatgttttagggtatgactaagtcattaggttgttactggtagttaggttggcagatgtaaactctttcgttgaagtcattaagtatcagtttcttggcygggtgtggtggcttatgcctgcaatcccagcactttgggaggccraggcaggcagatcacctgaggtcatgagttcgagaccagcctggccaacatggtgaaactatatctctactaaaactacaaaataaataaataaataaataacatgtgtggtgtggtggtgggcacctgtaatcctagctacttgggaggctgaggcrggagaattgcttgagtccaggaggcagagattgcagtgagctgagatcacgccactgcactcaagcctgggtgacagcgagactctggggaaaaggwtgcttagtagaatgcttagtgctgagaaatgacayggtgaattgactgtctttcaggtgtctgcagtgctgtgtgatgatgacatcatgctgaccattaagccagggragyatgggtccacatacggtggcaatccactaggctgccgagtggccatcgcagcccttgaggtaaagactgatacagccacacagtgtctattctttaaagcaatgttgaagtgatttttaatttgggcccactggtataataaaaaattcaataagaatgccaaatattagaaaacatgaagtatagaggaaaaattttaggaacaagatattctcaaaaagtaatttaaacttggcctagtagactggatttcctccgtgggcttcctgagttcacagtcacctggcgctttgagttcttcggccctggctggccctcatagaactctcaactgtgacccacctaccagacccgtctttttgcttagcaagcaagtcttctttcaagtgtggatttataatgttttcagactgattttttaagtgcctgctgaaggtatacaattattatgtaatctctgaggacagatctttgtgaggggggaagaaactattgcagtttaggaattacatttcgtccattgatgtattcaattaatgacagtatgtgagttgcattaaataaactttaatccttattttgccatgaatgattggcaatagatttgtgatgaaagcaagactctgagctagtgtatgtttaattagaaaytaatacaggctttgaaaaatagcaatgaaagttaagttcctctggtmttttatctagtcatgtttttcctgtgtttacagtcyccgttgtcctccaaaaaacaaaaaaaggacagtcttaatatttgtataatttttctttaaacgtaggttttagaagaagaaaaccttgctgaaaatgcagacaaattggrcattatcttgagaaatgaactcatgaagctaccttctgatgttgtaactgccgtaagaggaaaaggattattaaaygctattgtcattaaagaaaccaaaggtatggagataaaacatttactcaagataattttttaaggaagacctaaaatacacttggtatttaatttaattaatttatttatttttcgagacggagtcttgctctgtctcctaggctgcagtgccgtggcrcaatcttggctcactgcactctgcctcctgggttcaagcaattctctgcctcagcctcctgagtagctgggattacaggcgcctgtcaccacgcccagctaatctttatatttttaatagagatggggtttcataatgttggccaggctgatctcaaactcctgacctcgtgatccacctgcgttggcctcccaaagtgttgggattataggcgtgagcccaccgcgcccggccacactttttttttttttttttttttaagatggagtcttgctctgttgccaggctggagtgcaatggcgccattttggctgactgcaacttccgatgccccggttcaagcgattctcctgcctcagcctcccgagtagctggtattacaggcacgtgccaacacgcccagctaatttttgtatttttggtagagatggggtttcaccatgttggccagggtggtctcgatctcctgacctcgtgatccgcctgcctcagcctctgaaagtgctgagatgacaggcatgagccactgctcctggccacacttggtattttaattgggtgttgggatgttctgtttgaaactgctgactgacataatgaccaaaccttttagacagattattgtctgatttataattayattaagagtataaaaaatatagctcttttctaaatgaaggcacatttaaccaatttgacccttgttcctttaagacacttatttttctgccttaaattagtcatgcagtatttagagagttcaagtttttttgttggtgagtctggacttgaaagtgtcctctttgctatccttccctccctcactttgatgctttgtgtcagtagaggttataggagcagcagaaataatgatatgaatgacagttatggggtcaataataaaaataatgctggctgtcacttaattgggtgtttgatgttttagtacatcctttgtaacccttaggtgttccttgctggattttcttgtgataactcttccttttaaagcaacgattccaacctcccaaccttggctgcacttaaagaatcacctgaggggccaggcgcggtggcttatgcctgtaatcccagcactttgggaggccgagacgggtggatcacgaggttaggagatcgagaccatcctggctaacacagtgaaaccccatctctactaaaaatacaaaaaaatagccaggcgaggtggtgggcgcctgtagtcccagctactcaggaggctgaggcaggagaatcgcttgaacctgggaggtggagcttgcagtgagctgagattgcgccgctgcactccagcctgggcggcagagtgagactccgtctcaaaaaaaaaaaaaaaaaaaaaaaaagaatcacctggggagcttcttaaaaaaatgagtcaaagcctggccttaccccagggattctgatttgacggatctgggacggggcacaggcattagcaatagcctttaaggtgattctgatgtgcagccaggttgagaatcgctgctataatatgttgagctcaggaagcgagtccctttttggaatgtgtagtgttcactgggttttgagtattgcccattttatgtcagttaatcatctgtatcatacccaagttcttttttttcttttttagaattttatttattttatttattttattttttgagacactgccttgctctgttgggctggagtgtctgtcgccaggctggagtacagtggcatgatcttggctcactgygacctccacttcctgggttcaagcgattctcctgcctcagcctcctgagtagctgggactacaggcatgtgccacaccacgacaggctaatttttgtatttttattagagatggggtttcaccatgttggccaggatggtctcgatctcttgacctcatgatctgcccacctcggcctcccaaagtgctgggattacaggtgtgagccactgcatccagcctatacccaagttcttttgcattagttccttgtgtgattaatacagcagccttagcacattttttttttttttttggcttggtctttttcatttatgaaaaactatgatatgtctaatcatatcattcaaacctagttatgtgcttgctgaaaagtgaagagtaacttcatttttaggagtaaaaacaaagcaagcttgcagctccaagcttccctttcttttttttttgagacggtgtcttgctctgtcaccaggctggagtgcagtggcgcgatctccgctcactgcagcctccgcctcctggttcaagcgattctcctgcctcagtctcccgagtagctgggactacaggtgcgcaccatgatgcccagctaatttttgtatttttagtagagacgggtttcataatgttggccaggatggtttcaatctcttgacctcgtgatccacccacctcggcctcccaaagtgctgggattacaggcataagccaccgctcccagcccaagcttcccttagttgagcaagttctgttaattttgttttgccaggctgcactttgcccatacatayggcaagggatgtttaaacgtttatctttgagcatgtacgttttactatttttctttagattgggatgcttggaaggtgtgtctacgacttcgagataatkgacytctggccaagccaacccatggcgacattatcaggtttgcgcctcygctggtgatcaaggaggatgagcttygagagtccattgaaattattaacaagaccatcttbtctttctgagggtagccagctgttttcagtggtccctgggagccagctggagacaggtggtcctgtaaaagctttattcctaatgtgggcacattccactcccatgagtcttcaaaaactttttttttgaatatatttttttcagttgatacataatagaacaacgtttatgaacctgccgtttgctttgtaaygtaactaaataatgtaatggcatctatattcagttgaagtgttttgatgtgcatgtgtacttcctaaggtgaaatgcatctatatacagacagcctctaaatcaagtccttcagtataattgatatatgtttttataatttcctcactggtataagtgtttcatatttgaaaaagttatctctgggtattgcataaaaggcttcatcttataaagtgaaatcattgttattgaattttaggaaggattaatggttaagtgtatataaaatactaatattaagtaaacttcatattggccaacaccagggttgtattctatggatgtcattattttgaattaagaattagygtttaacattcctaaattgttttgagtgcttgattataatttgtaaaaaatgtttattttcaatacttctttaaatttaaaataaagcttatatttcaaatgtctgttttgtgatgattattcaccttaaaaggaagaagctgaggcaaaattaatatagaatgtttaggtgggccaaggttggggactgcagctcgggacacacttccaggttgccctggagagtgctccagagaacacttcttaaagaaaaaaggatagatcagctgctcttataccctctactgacacaaggtgaaggggtgattacaaaagttgtttatcaggaattctcattggcttacagaactaaccttggttagtgattggctatatgctgttgaactacagggtatatggcatttgatagatacttggcttcaagaggtaattatgtagcttgggagagagtgacctgactatgatttcattctattgcctctctgggcctgataatttagtttttattttttgagatggagtctctctctgtcgcccaggctgcagtgcagtggcacgatctcagctcactgcaacctccacctcctgggctcacatgattctcctgtctcggcctcccgaatagctgggattacaggtgtgcaccaccacacccagctaattttagtatttttagtaaagatagggtttcattaagttgaccaggctggtcttgaacttctggcctcaggcgatccccccaacttggcctcctaaagtgctgggattacaggcatcagcccctgtgcctggcctgggcctgataatttaaaggggctcacgttcttcagttacaagatttctttattccccatgtcactatgctattactgcagtgttatcagttacatttttttttttttttgagatggagtcttgctctgttgcccaggctggagtgcagtggcgcaatctcggctcactgcaagctccgtgtcctgtgttcacgccattctcctgcctcagcctccccagtagctaggactatagatgcccgccaccacgcccggctaattttttgtatttttagtagagatggggtttcactgtgttagccaggatggtcttgatctcctgactttgtgatccacctgcctcggcctcccaaagtgctgggattacaggcgtgagccactgcgcccagcctatcagttacatttttaagctttttgagatttatttattccatgtgttttcttttttttgtattccttttttttttttgagacagagtcttgctctgttgcctaggctggaatgcaatggcgtgatctcagctcactgcaacctccgcctcccgggttcaaatgattcttgtgcctcagcctcccaagtagctgggacaataggcctacaccaccatgcccagctaatttttgtatttttagtacagatggggtttcaccatgttggtcaggctggtctcgaactcctgacctcaggtgatccacccacctcggcctcctaaagtgctgggattacaggtatgagccactgtgcccggcatattccatgtgttttctaacagcatttcaactctgatctacagaaaactagaagttataaaaagaatacatctaaaagataggtctcatacttccctttcaaagtagcgcgttctctgtgcatatactaatgtttatcatttttttaaagttatcctttttatatgtggtgttctgcaactttttcttttttctttcttttttttttttttttacctgaacagagtattttggatgtttttccgtcttattctcaaataattagtatttcatcatatatgggtatactgtaatttcatctcatattgggaccatttgacttgaataaaacttgtgaccacttcatatcttttcacaatggtgcaaaagtgcacagtgtttctatggagtaaatccctagaagtgacttgcttttcaaagaaaaaaaactcaagttaattgtgtcacattgctccctgcctcccccaggttctaaaaagttacctcttagcagtatgagagttgagtctttggtactctgtcagggtagtgctctgtcactgaatgactacgtttaaatgagtgagcagttactgggaggcctcctcataccaattacaactggggtggcacccaggccaggtaagctctccagggcattcaaggttgagaacctgtcttaggaatcttattaagatgcagatttttgttttggagacatagtctcactgtcacctaggttggagtgaagtggtatgatctcggttcactgcaacttccacctcccaggctcaagcgattctcccacttcaacctctctactagctaggaccatggccgtgtgccaccagatttggctaattggtttgtatttttggtagagacagggttttgccatgtttcccagggtggtcttgaactccttagctcaagtggtccacctgccttggactcccaaagtgctgggattataggtgtgaaccacagtgcccagccttaagatgcagattctaattcagtctctctctgtgtgtgtgtactggagattccacatttgcaggttgccttaggacatactattattatgatgagtcagtttaatttgcattcagttattctcaccagagatgaccttagggcaggtgatttttaacaaagctatcttcctgctaaattctttgaaggctttaaaagtcagagaggacccagaggtaggaaagtacagggagttgtggagacggtggccaatgacaatgagggcctttgggcttaatttggtgagcagtggggtcactgaagaaaggggttgaagcaggggcgtggcgtgatcctattagaaaatcctaggctgggtgcggtggctcatgcctgtaatcccagcactttgggaggctgaggtgggcgaatcacctgaggtcgggagtttgagaccagcctgaccaacgtggagaaaccccatctccactaaaaatacaaaaaattagccaggcgtggtggtgcattcctgtaatcccagctactcgggaggctgaggcaggagaatcacttgaacctagaaggcagaggttgcagtgatcagagattgcaccattgcgctccagcctgggcaacagagcgaaactctgtctcaaaaaggaacaaacaaaagaaaatcctttctggctgatggtttagggcttactcatgcagtacacactggttgtagggcctcagggcctatgtccagtggtgaacaggtgggcaggaacctgctgacggcacttagtgccctggggatgaagtggaggggtggtgaagcgggaggcagggagagtcagacacaggctttggatttggggtagaacatcagggcaactgctgtggttagatactccctttccttagctgtgaggaagtgggatgctatctacctttcaggggagttaggaggattaaaaaagatggagtaggtcaagctcctggtggaggacctggcacagaattacagatcaataaataagttgctagctccccctccccacccccaacacatacagttggaggagtttgggagagaggaagcttcgggagaaggattctttcagataagggtgacatctagataaggaagagatggcgtagagctgatagcctggctgtatcacaaaggggatgtcaagttaaaggaagaagctgaggcaaaattaataatcataaagttattcatgatagcaggaggcagacaaaatgcctaggctgataggggcggtccccagtgaaacaccaccttcaagccaaaaacagcctgaagtctgaaagactgaactgttggttctggatgaaacctgtgacccagagtgagaacttctgttcctatttgcccactctttcccgattggttctttctgaataacgctttttgaccagttgaatgttgccttttctgatactacctatggcctgcccctcccccatcctgtgcctataaaaaccccagactcagccacactggaggagaccaccttcccgtctcctctctgctgagagctgttttgtcgcttaataaacttctctgccctcaccacccctcagttgccagtgtgacctcattcttctttgacggacaagaactccagactcactgaacatgggtactcacaaggctgtaacactgtggccctctgcccttcactggcagagggcagatgcctcatgtgatggaaagtagtgatggggcggagctggccccggagctgcgggctggaatggggcaaggggctgactgagctgttaacatgccaccgtctgttgggctatggatggtgggactaaaagagctaatgagcacattgtaacactcttttggggctttagggtcatgggcacccctgcctgggcaccactgcattccccttggagtgacacacctggtccagctgcaaaccccgcatggagcccacccctgtgccagcatttggaatggctggctggaccccacacttgctcactcacataccccctcccaccagggcctgagcatgcagcagcagctgctgtgggatctgcgccggagtgcaagccagatgcggcctggcaggcccagtagatggggtgcctcctgctgcgtgcctggcaaaggggccgagaaaaatcttctcatttgggccaagcttgagaactgcagcccaggatacatcatcagtttgccttggggagtgctctggagaatatttataaagaaaaaaaaatcaggagaaggggtgattataaaacttatttattaggaattttcattggtctagagaattggcattagttactgattggctattcattgttgaagtacaggatgtatggcgtttttgtggccatttggcttcagttagtctagagctgcatggcaaggggcttcgagaggtaattatttagctcaagggggagtgagacctgactgccattatattttagatacttttctgggcctgataatttaaaggggctcacattcttcaggtaaaaagttatttttcttcttcggggaggagtggttcaaagtagaggagaactcacagagtatgtggtgcccagatgcacatttagatatgtgcaaaagaaagatgataatcttggtacatttttgcactttaaatagtcaccaccttcactctccacaccccctaatgataacttgttctttggattctgaccttccagaatacctcatctaaattaattactgcacatataagaaaactgaggttgggataggacatctgatgtacccagaataacagaggtgaaagtgacaatgcgtttcaagcactaggactgtgaagttcccagcatgctctctgcagcacatctgtatgtgatggggaagcaccacagaggtcgggggaggcatataggggacatttataggtttagatctgtgctgctcaatgccagctgcacttcagagtcacctggcttgcttaaaaaattagtatcggccaggtgtggtggctcatggctgtaatccaagcactttgggaggccggggtgggtagattacctgaggtcaggagttcaagaccagcctgaccaccatggtgaaacccagtttctactaaaaatgcaaaaattagctgggcgtggtggtgcacgcctgtaatcccagctactcaggaggctgaggcaggagaatcacctgaactcaagaggcggaggttgcagtgagccgagattgtgccattgcgctctgggctgggcaataagagtgaaacactgtctcaaaaaaaaaaataatattgatggccagacctcacctcaaatcaattacatcagcatctcctggatggggccttgcacctggatattaaatgctcctggggattctaatgtgcagtccttgcaaagtgggtattgagtgtgaggcagggtgtcattcacccaaccatgctggggcactgacgtctactggtgaataaggcacacgattcctggcatcagcgggctttttaataggtacatttatttcaaaaatgtttattgagtaccacttggctggtcccggaggatagacagtggttcaaataaatagcatttattcagcagtctgtgc

SEQ ID NO: 95866 - DNA, 29231 bp, Homo sapiens
taaaatacaaagaagggcagttatagatccattcatggtcttcatttttgcctccttctaactctgagttgcctcccttagtctagcatacatctagcacctgcagctttttttttttttgagacagagtctcattttgtcacccaggctggagggcagtaaacctccacttcccaggttcaagtgattctcctgcctcagcctcccgagtaccttggattacagacacccaccaccatgtccggttcatttttttatatttttagtagagacagggttttaccatgttggccatggcttgtctcaaactcctaaccacaagtgatctgcccacctcagcctcccaaagtgctgggattacaggcatgagctactgcgcctgacctaactgcagctttttgagtaagtatgaagcctagtgtcttgaggtgttcccatgtctgacaattctaaggagccctttcctctttaaaactggcaaccacagtggctgttttggctcttgtgttcttcctctggcagcagaaacctacatatgcatttaccacgggcatcaacagctcccatcaaagcaaagagctagcccggagcagaagaacctgcaagtctgggccagctggaagattacaaaggtgtcaaaacaaggggaaaggtagagtctctgagcctgaatgaaaacataaacctggctgcacgtggtggctcacgcctgtaatcccagcactttgggaggctgaggtaggtggatcacttgaggtcaggagtttgagacctgcctggccaacgtgtagtgaaaccccgtatctacaaaaatataaaaattagctgggcatggtggcatgggctgtaacctcagctactcaggaggctgaggcctgagaatcacttgaacccaggaggcggaggttgcagtgagctgagatcgtgtcattgcactctagcctgggaaacagagcgagactgcatctcaaaacacaacaacaaaaaaaccccataaacccaactctgaactctgtaactgtttcaaggatgtcccaggaaaacagcagcacagtccccttctcctataagtcttatattgtcatccagactctaacttggtagagctcatgttcacaaacatccccatcccttttctacttttctgcagctcagaggataaggattggttttggaagcagaaagttttcaatttcccccaatcagcaaactgtttaggtataaaaaaatttctttaatcagaaaggatttatcttccctcaacacaaatgcacacattaatagtaaaaatacatatatacataaatatttacacaaagtagaagtcacagtggacagctgtatgccctgggctagaggttgagaagatgagcatcagcagcaactggaggatggcttctctgctgctcccggtgtcctatggtcatctttctggccaaggtgggtagactgggaggggatagggtatagctccagtctgatggcagagttactggcaaactgtagcaacgaggaccctctccagatagtttcataggctcaccagggatgacaggagatgctgtagtaggtgggactggggtggttggggcagagtgggtgaagggttgcactccatgctggaggaaaagaatgacgccaatgccggttccagtgcctaaaggaccatggctaaaggagatagtacctggggagctgagaggggggttgcaaattggagtggtgtggatccaggtgaggttcatagctggccattgtgtgaggtgccaaggctgctttggttttaaagctagatgtcctagctgtgtctggtccatcttttccataggagatgcaggagaggaagcagctgaatcactgtggtggcttggaaaatgctasagaggggagaaatgagaaaaaaagaaatgtggagaaagcattcagatgagctccacctggttacttaaacctttgcattccttgggaactcagtttgcaatgcaaacatacctcgttttatgcaacagatatgatcttgccaggccatgattaagtaaaagttttggtaactaaattatactttcatttattaaacaaataaatggcctactatggaccacatactatattagacactggatatccagagatgaagaaaaaacaaacagttccataggttctcactatttataaaataatcccttttagaatttctttgaagtctatttttaattggaatcatcatttcccaaattctgtatttaaattcgaatattctatcttgagttctttaagaagtgtaaattaatattcaggcaagatcctcctactgtttttttaaaattttatatttgagacagggtctcactctgtcaacgaggctggcacaatcatggcttactgcagcctcgacctcccaagctcaagagatcctcccacctcagcctcccacccagcctcagctgggactacaggtgcacgccaccatgcccacctactttttgtattttttgtagatagcagccttcaccatgttgcccaggctggtctcaaactcctgggctcaagcaatcctcctgctttggcctcccaaagtgctaagattacagtgagccactgtgcctggcctacttattttttaatagattagtcacagcaataataaccatggctgattgaaaattaggactggtgattatctacaggagactctccttctccgtcatttgaatgccctctacataccctattatttgaggacagaaaataggtcactttttttttttttttttagatggagtttcgctcttgtctcccaggctggagtgcaatggcacgatctcggctcaccgcaacctctgcctcccgggttcgagcaattctcctgcctcagcctcccgagtagctgagactacaggcgtgcgccaccatgcctggcaaatttttgtatttttagtaaagacggggtttcaccatcttggccaggctggtctcgaactcctgacctcatgatccacccgcctcggcctctcaaagtgctgggattacaggtgtgagccaccgctcccggctgaaaataggtcacttctataccaggtctaagaatctatcaacactgctgctattggtgcccccctcccctacttccagtgaggtacctcttatgaccagtccttgaaacccagtgtagactcaaaaactgtcaaagggtttggcacaaggatacgtgggcagaaatgaaaagaaggagaagggaagggtttgggggcagtagggaaaaaagagtttgcagagagaagctgaggtgtattcccgcatgaatcatttggccaggtaaaaagccttttgtatctacgcagaaagcagataagctgtggcatgagggataggattaaacttcatggagttcctcccagtgattcaaacaaaacaacaacaacaacaacaacaacaaaacatgtaggaatcaagacaatgcagaaagtttaggaatttccttccctgaaaagaaacttgaagaaaagactcaaaagaaaatggcaaaaggggccatttctgcatgcacatttcattttcttggctattttcccacctcttcctcgtgttcttaagttcttaccttggtcagctgatgcttgccaccacccaatgatgacttctgggcagctatttgtggaaaccaagtctttaacatcccttctacctgtagcaaggttcctaggtaacgttccctgtgaaaatgacgttgctttaaaaaaccagcaacaggattggagaaatctcctttttatgaagacccaagcaaagaaccagcgggacttaccccatctgtggcttctgcaaaacacctacaatacgctggatcctgtccattgccacactctgctgaaaactgcttaatcctggggacagggacagagagagattaaggattgagattcaagcatgtagtcaggtaaaggaagaacagaagggggttaaaattgattgatctaaaaaaattaagtcgggccaggcaaggtggcttacgcctgtaatcccagcactttgggaggctgaggtgggtggatcacctgaggtcaggagtttgagaccagcctggccaacatagcgaaaccccatctctactaaaaataacaaaaattagctgggcatggtggtgggcgcctgtaatcccagcgactggggaggctgaggcaggagaatcgcttgaacccaggaggtggaagttgcagtgagccgagatcgcgccattgcactccagcctgggcaacaagagcaaaactccgtctcaaaataataataataataataataataataaagtcatagtagcaaaaaaggagtaatataggccccaaacaagaacttcagagaaatacacgtcaaaagagggaaagagaaagagaaatgaacctagcccaaatgaatgcaacaataagattacctctctcaaaacgacccatcttcagcccattgagtaggtctgtgagaggaggtataaatccttggagttctttacactgtaggaaaataggacaaaggctgtaagaagacaaaaaactgcccacaccagcagtggctcttccttcacctccaaatctgggagtcaatactgtcctcacagggtccttatcaaccagctgggtgctaaggcactccaggagaatctcctttcacctgctttctcttaccttctgggcaaacagcaggtctccctctgtggtacaaccytgggtgtttagactggtctccagttcaccatctcttgatcttttcgccccagatcctgccataggagaagccgaaccccgctgtttcggatgagatggtgtatgctggttaccggaaaccttcgatcgatgcctgcagcggataggacccgggctgggccgtgaacctcccctctgcccaacagtgtctggcctgggcccatgggcccccttgtcctccctctcactatcagaggggaagccaaagtcactgttcactggggaggtgggaaaagacgaagagagagagtaggaggaataggaagaaacgctagatggagaatccataggtccagaagcaggggctatagaacagctcctggagtacccaaagatcggaacctgcaactgaagagcaaagcgagggagtttgaaaccrgagtttaaggattaggaaatgaactgggagattggggtgtactgcgtgggataatacttgttctccccctccccaatattaccggtctcaaacacaatagaaaaagacatttctacccccacccccgcccattaagagcttgggattccctctctggccgccgcagagcagctctcggtctgacgcggcctccgttcttttcttccctcagttcagagtaaataccgacttgaaagacaccttcccctccgcccgttgttcgccagggctattcgccagcctgagtccgcagcaagcctctccacctgaggccatgccacccacaagcagtcaatctgggcacgcgaacccacctggtgatcctacgggaaccgcccccatagagactggcctcctgccctctcccaatctttcaagatcaggatccctgcgccggtctctctgggctcgcacctgccacgtgatgcaaaccctcccaataccaagatctgcattcagcccccaaatccactcccaaatactccctaacagctcgctttgtcctccgaatctccttacctgttgtcagccggctcagccctggctcggtttccagctccttcgccgtctctcsgggtctatctacccacctccgcctctctcagtgggccccgccccttcccccccycccagacacgtgcggcccggcacgtgcctccccctgcttacacagatctcgcgccctcattggttgtgtcgccggtaacacgtgactctagttactgaagtccatagcccatttgctacagtacaaaggggctcagccagtagagaggcagccaggtgatgattggctgtaagggaagcattccgtgctcctcccctacatgcggctgctggagaggacccggtgatgagaaaaggaggaggatggaaaaagagtggaaaagaagggaggggaggaaaagggcggagcccgtggccttaaataggatggtgatgcgccagagatgcgcggtttgagtgttcagagattggttgtgctactgaaggcggcggacgtgggacccccggttccgtctcgggaagtaactcatctgccccctctttgaacacctccgctcacgagcgcagcacgtggaaaccgtcagtgatttgtgtctgcaacgtgtgtgagagaatggaggtgtgtgacacggtatattctcctgctctcggcggcccagccctcgtgactctccggtctctgtttcacctcccccacccctttctcctccaagttgggtgcctcctgccctgctgggtgaggagggtggggattgcaaccgagaacaccgcgtcctttctggctcccgctggggcggctcctccatcccttttcttacataacctaccacgcacgttaccagctcagatgccagcccgccacgacgctagaggtcaaaacgaaactcagtttttcctgacttttttatccaggcttctcgggcccggcgtcctaaattatctgattccaagcacggggaacagaatggggtaggtccctgatctcctaggttatggttttgtccagcttcagtcccttcatttgtccgctggagaagattcgaaagactttgaaggaggggagggaggcaagtccagagtttagagagtctcagaagtaactgggacgttactattgtcgttgcgccttgcattttgagagtacaatggagaggagagcagggcccaaggactgtgagctggttgaagataggacgtcggagagaccgcaagggggcagcccaattctaattagggtcccgaggatagcgaattaaaaaaaaatttaagtgagtttgtccctgccataattaccaactgcaaaaggcacattgttggacagaggtgtgggtaggggtgggtaggtgtgaatattttaagtctattctaagtagtttttgatattttaccttatgttttaacaatgtgcttattcttataaaaagaaaaaaagattctaaaacctcaacctcgtttccccaagcacactgtttcaacaccatacttaataaaataaaacaagagaattaccaatatggactgtgaataaacctgttgtctgtgggtgcccttctccagtcttctccaaactgcaggtttattcagtccataatgccctctaattcaattgtcacccacctccccttccaatctacgcttgctgcctctaaatcctggcgctctctttagttgtgactttagaacagactcatgaaggagtagatggtaaccagattatttcacttattatttattttatcttccaatttcctcttgccagactcccatccaaagagtcatagcagccttcttccacctaaaaaagcagagaaagaaagaaaataaaaggagtcaggagacccgagaaaccccttcatgccccccacactctatggaaactccccagatattctgagctgggattgctctgtgatagctcctgggaaagatgtgtgtgtacccctctcctccacagtcctttcacctcctgctgaatctctctatgatcaatggttatttagcatcccaatttaaaaattcttttcctataatacggctttctcttcccttctctcccmccgccctgccatacatcagagaaccgccatccgttctgcctctgaactttgcctcttgactctaccaggttgtaagacccacccactttgccctctggcattcgccatgacttgaaacgtggccaggctggaactagctttgattgttcagacattttggaagcttggagaagtattcccccaaccccatcatctatctgctctaggagatcctgaagtcctcttagttcagaaaaagtaatgactcatcacaaaagtctgcctcagcatctcctaaacttctttaagactgaataagaagatttttctaaatgtgatccctcttctttcattttacttgttattttttgagacagtctcactgtgttgcccagtggcaacagtacagtggccagatcatggctcactgcagcctccaattcttgggcttaagggatccttccaccccatcccccccaatagctgggactgcaggcctgtgctaccacacccaactaatttttatttttaatttttttaacgtcttgtagaggagttcttatttatttatttttaatttttttgtagagacaaggtctgttgctcagcctggacttaaactatgttgctcagcctggtctggaactcctgggctcaagcgatcctcccacgtcaycatcccaaagtgctgggattatagggatgagcctaaatctcttccttcagtggctgataattgaccaggctggaaacactaactagagatactggtaagaattacttcggtttagtgtgggaagttaaaaaatattatttcacagactcccccaaagccagtggctgcactcttaccttctacatgaaatacatccccacctgaacaaaggcacacgacaggaggaggggaataggacttcgcaaactggacacggcatcgttcagatctggactctgctaaaataccgacatccccacacagtaggctggtgtcattcctcctaccacttctctgtccccctccagaaagactgccacctctttacaacaacctctgtcttcctttcctttgggcttagagaaagatccatcyttccccatcactgtaaggagtccttctgtgcctttcagctatccctgaccataccagggaggccaattcaattcaattgtttctattttttatctattatgtgcattatactatactagtcactgtgctaggtgctatagaaagggacataaatatgaataagacaagattcctgtcctcaaggaatttacaatctaaagagagtctactctatattttatttatttgtttgtttatttattattatttttatatccaccaggctggaatgcagtggtgcaatctcagctcgctgtaacctctacctccagggttcaaacagttctcctgcctgcctcccaagtagctgagattacaggcacccgccaccatgcctggctaatttttgtatttttagtagagacacagttttgccatgttggccaggctggtctcaaactcctgacctcaggtgatccgcccacctcagctcccaaagtgctgggattacaggcgtgagccactgcgcccagcctactgtatacttcaaaaagaattaactgcccttattgtcaatctttcacttccattcttactggcttctttcatctgtgctcaactatatgcaggctgctctttggtcctattcccctttccagccgttgcttctctttttcattaccagattttttagatggttggtctgtactcacctccctttcctcataatgtactcactctttaactccacaaaaatctagcttttctccaagcactcagttaaaactactttcttgagagttacaagtgacctcctcctccttggcctcttggtagcttttgatggattatattaaactttctcttctagactctataatacaaacttggctatctgcctacttctccagtcaaatccttctccattccattcattaatttctyttcctcccactcactacaggcacagtcactggccttctgagcttgtgtgtactggctctgttgagctcatttactttcatatctgtgactttgcacttagaactctagccctgatctagttcagtgacctttaggacaccctcatagggctgtcaccataaactcagcttggccattaccaaattaataacttctgtcctaaaccactctggcctcccatagttcccactttggtcaaccattttcccagacatccatgtttaaaacccatgagttattttaactcactcctcatttatacttcatataaaattatcactcaagcaaggtattttcttcataatatttatttttctcctctccattcataatgccagagtacagattgtttctggaacaacgcaaatctcatgagttgctttccactaaattatttacatcctgcatacaacctgaagagtggtttttcttttttctttttttgagatggagtttcactcttgtttcccaggctggagtgcaatagcgcgatttcggctcactgcaacctccgcctcccaggttcaagcgattctcctgcctcagcctcccaggtagctgggattacaggcatgtgccaccacacccagctaattctgtatttttactatagacagggtttctccatgttggtcaggctggtctcgaactcccgacttcaggtgatcagctcacttcagcctcccaaagtgctgagattacagtcgtgagccaccacacctggccggtttttctaaaatatcacttttcatcgtgtttttaccataatgaagaacttactaggctccttgttgattatgagtccagacttcagcctgacacctgagactctctgaaatttgcccctatgttgccacatgtgaaattactaagcaagtattaggagccttgtaaattttatatttttcttaattcccactgttcccttccatataccctctccttcaatcataccctatttgctaaacatattatgcttgttctattcccccctcctgtgcagctctttcactcttttttttttttttttttttttttttttagatagagtctcactctgtcgcccaggctggagtagagtggcgtgatctcggctcactgcaacctctgcctcccgggttcaagtgattctcatgcctcagcttcccaagtagctgggattacaggcacgcaccaccacgcctggctaacttttgtatttttagtagagatggggtttccaccatgttggccattgaactagccttgaactgctgacctcaagtgatccgaccaccttggcctccccaaagtgctgggattacaggcataagccgccatacctggcctctttcactcttggaataactattcttcctcctaattgcttctgtccttccataactacccaccaatcaaaagctcatctattcttcagggtgtatctcaagcacaaatgcctcttgaaagcttttcagacaactctagcctgtactaatctctcttcttacattggctaaagcactgccagtatcttctgctttcaaatttatatataatttaacatcataacataccttttcattttgttctaagtgtttcgtaaacttgaattttataaatccttgaggacagtaacatagatttcttttttatcagcatcagttaccttagcagccttaggcatagattacatacctattgaatactactgaactgaaatttaactgtaccatatcttcccagtgttctgtaaacagggttagtattaaatcttagtgaaacatggccaagttgagatgaatacctgcaatgaagtactaattatttggttctcccatccaccaaagcctggtattccagccctctatktattccacgtcactagggatgtcctgtctccccccagcccccaatccccaatcaactcacaggttccgttgttactggtttcacagttacaggcttcggatggtctgcacgtgctgtttcaagactaatggtagtctctattgcttctgttatgtccttatccaacctgttctaccctcagtaggatttgggaaacacagagttatcagtttttccatccaacatcttcatagattctctacttaaagttctccccttcaccacctccacccagcccaaagacttaagytcagggattcccccctaccctatgcttgcatagatttgtacccatctcattcaaaagtcccttgatgcccctcctcagtgtcttagcaaacttactgaggacaatttataaagttctggcttttttctccyccccagataggttaacaaatctgttttgggcctactacttagtttctcctcatcaaactcatttttattcttgttaatcagatacatttcaacattgcccagtttcttttcttttcttttttcttttttttttgagatgaagtctggatctgtcacccaggctggagtgcagtggaacgatcttggctcactgcgtcctccatctcccggattcaagtgattctcctacctcagccttctgagtagctgggattataggcatatgctaccatgtccaactaatgtttttgtatttttagtagagacggggtttcaccattttggccaggctggtctcaaactcttgacctcaaatgatccactcgccttggcctcccaaagtgctgggattataggcatgagccactgcgcccggccagtttctttttaattgttacttatcctaacccttttagatgtagagttcactcaccagcctgtcctctgactcaaatatggagtaatcaatggtgaaatctgcactaaagtcatctgcagaggagaaagaaaatcagtaataattaaagaaaaatgtaactctagatctggaaatgaaaagggaagaaattactcagaatagtttaacttaagttgtaacatttattggtataatccaattttatttaactaatgttaaaaatgactgtgaatgtgtatgcatttatattttcaatgtaggtatctaaaataatttacaaatttgaaaaattttcaagttcttctttttttagagtcagggtctcactgtgttaacaggctggagtacagttggttcaatcatagctcactgccacctccagctcctgagctcaagtgatcctcctgcctcagcctcctgagtagctgggactacagccatgtgccaccatgcccagctaattaaaaaaaaaaaaattttggccgggcacgatggctcaagcctgtaatcccagcactttgggaggctgaggtgggcagatcacgagatcaggagttcaagaccagcgtggccaacatggtgacaccttgtctctactaaagatacaaaattagccgggcatggtagcacacgcctgtagtcccagctacctaggaggctgaggcaagagaatagctggaagccgagaggcagaggttgcagtgagctgagattgtgccactgcactctagcctgggtgacagcatgagatttggtctcaaaaaaaaaaaaatttttttttctatagagacaaggtcttgctatgatgtccagggtggtcttgaactcctgggctcaagcaatcctcccatctaaaaatcactatctggaaaaataacatcatcatgagtctttttttttttttttgtgacgtagtctcattctgtcgcccaggctggagtgcagtggtgtgatctcagttcaccacaacctctgcctcccaggttcaagcgattctcctgcctcagcctcctgaataactgggactacaggcaggtgccaccatgcccagctaatttttgtatttttagtagagacagggtttcaccatgttggccaggctggtctcaaactcctgaccgcaggtgatccacccacctcagcctcccaaagtgctgggattacaggcatgagtcactgcgcccagcccatcataaatcttttttcattttttttttttttgagatggagtcttgctctgtcacccaggctggagtgcagtggcacgatctcagctcactgcaacctctgcctcccgggttcatgccattctcctgcctcagcctcccaagtagctgggactgcaggcacccgccaccacacccggctaattttttgtatttttagtagagacagggtttcactgtgttagccaggatggtctcgatctcctgacctcgtgatccgcccgcctcagcctcccaaagtgctgggattacaggtgtgagccaccacgcccggccccatcatgagtcttgataggttttgttcatagccagatttttctctgaccccattgctctgcttcaaagtgaagagcaaagtctcagaactaaatatcctgaagcctctctccagttggctaagggcaagagcctttcatgtactcaccataactgggggtgactgtataataatagaccacctgataatattcatcctctcccagtctttcttcatcctcatattcttgtcctatggggacaaggactagaggtcaagggacatctggaacaccttactaacaaaaggacacctggagatgacctcagcgctcccagctttcttgctctttctttcttttctctctctctctctctcctccaatagtcatactcctttcttgcctgtgcacctctacacccctctcagtcttctgggatccatatctgtaatgaggcctgttactccgtgccctttcaatccaggaactcctaaaacagaaaacagtccccttcacatactataaacccaaagggagaaccagacctaaaaaaggtaggaaaagtagagaccaggaattaaaaacgccaagtcttctatttagtatgctccagatcttactgtatttgtgagacatcttttcttatcagtatctcttacaaataactaacatacacccttaggctttggatttgagctttagttccaccttcactgctaacagaataaccctgaacaatccacttaacatccgctttcttaaaatgagtcagctggactaaaatgacccatctctgttagtttttcttccctttcagaactaaaaatatgtggctttgatatgactggatcaagaactccaggcctcctgctaaacacttccctgagctccttgaatgctttcccttcaactccaagctaatgacacaagaatctagaggaaaaggaaacaatgagacacacctggtagactggggaacaaaggagggaaggagccaagctactcttgggaccctgtccctgaagacagccagttttccactaccctaaaggtcaccccacttctgtgtctttactaatagcaggtttttttctccaattctctgggaaaggagataccctaactactagtttcagactgtgacaccttccaataatccctccttcacccttactttagcccctgtcatcttgttcaacttccgtggtgatggagaactgagctcagtgttgctagggcctccttgtgtctggagctccatcctccttgtttgacaggactctgcttttttccccctttcctggctctgccttccagatctccattctgccctcaacaccggaccccagcacgatgagaaaactctatcgctccccactgaaatgtacctctcacccactcctcattttttttctcccaccccatttatggtagaagacctggcacaaaagctcagagagaggagtggacttacccaggataagtggcacagcaaagatggctacaaagaggacatccattctggattctgcactattgctgtgaaagtaaaaaaggaaattacagagtttcccaccaaacttaccccgcctcccctcctcctccaaagcagggaaggagctgcagcaactcttctcctcccagggggcagaactccccgcctactggctgactgactagatctccggttactgccggtccccagccagagctgcccagattgagaggcaaaagggggttttgatgcaaacatgtttcttaagctccccctgccctagattagatccattcaagactcccactgtcactaccaaaataaaaataaaaaataagcctaccaagaagtttcccctctcccggctttccttccttcctccaaggcctcataaaaagttcaccctccctctcactgtctctgacttaccatcaccacccagagttgcctttctctctgaggcttcatcagtctcttttcgtcacagtggaaatgttctgaggaaggggtgagcatttttctagactgaaaagaatccctttcttctgtctgtctggagctatagagaataggaacaatatttacccatcattgtctgacttaaagcacctgctgcatggcttcagctaaaagtctctcagccatggtcagttatttcctttctggtaacactgacctcacctcacctctttgttttttttttgagacagaatcttgctttgtcacccaggttggagtgcagtggcgcgatctcggctcactgcaacctctgcctcccgggttccagtgattctcctgcctcagcctccctggtagctgggactacaggcgcgtgccaccatgcccagctaagttttgtatttttagtagagacggggtttcaccatgttggcccaggctggtctcgaactcctgacctcagatgatccacctgtcttggcctcccaaagtactgggattacaggcatgagccaccgtgcccggcctcacctcatctctttctcaacttccaggatgcaggttggaagaagggagaaagcagatagtctctttccctgctacaggtgccacaccttccctcccacattcagtcacttggtatgttcccttcattccgtcctacaggtgtagagtttttatcctttcctctgcttttatgtttcccatgttcattcaattcagaaacccttagcaacatacgtgctaggcacagtgtgctaggcctagtgtgataggcaattgagagcttataggcaagggaataagaaaagacagttttgctttgttcttaagggaagttaataagtatctgctcaacatctactatgagtcaggcactatgcaagtgtctgtggaaacacccatgaacaagataggtttacagcctcctgtcaatggtcagaagatgctgtggtaacagctcaatggagagatgaagctggccacagtggctcacgcctgtaatcccagtactttgggaggcttaggcggacagatcacctgaggtcaggagatcagcctggccaacatggtgaaaccttgtctctactaaaaatacaaaaattagctgggcttggtggcaggcgccagtaatcccagctactagggaggctgaagcaggagaatcacttgaacctgggaggcagaggttgcagtgagccgagatagcaccactgtactccagtctaggcaacagagtgagactccatctcaaaaaaaaaagacatgagaattgtctcattcctatccaccttactctgcctgctgggctcagaagcaggacatactggagtcttgaacacaggtcatgataacgctaccctcttaatttttttttttttttttttttgagacggagtctcactctgttgcccaggctggagtgcagtggcacgatctcggctcactgcaagctccgcctcctgggttcacgccattctcctgcctcagcctcctgagtagctgggactacaggcgcccgccaccacgcctggctaattttttgtatttttagtagaaacggggtttcatcgtgttagccaggatggtctcgatctcctgacctcgtgatctgcctgcctcgacctcccaaagtgctgggattacaggcgtgagccactgcgcccagctaccctcttagtctcattagggaataatttgcctggtgactttccatgtaaatattttctttcttttttttcagagacagagtcttgctctgtcgcccaggttggagtgcagtggtgggatctcagctcactgtaacctccacctctcagattcaagctattctcgtggctcagcctcctgagtagctgggactacaggtgcgcaccaccatgcctggctaattttttgtatttttagtagagatggggttttaccacactggccaggctagtctcaaactcctgacctcaagtgatccagccgccttggcctccgaaagtgctgggattacaggcatgagccactgtgaccagcctccgtgtaaatctatacaatctattcctcagctcctttccagaatatcctggaagacatgtaaaacatgtatgtgagtgtgcacatatggattaaataataaatcacttccaggaaggaaaggaagtttggttatctttaaacaatttctgtggggtttttttttggtactttgattatgctttcaaaaacaatattccagatttctttcctcttttccatcctcagattcctttgcctaacatcttccctaaggactaacctctccccatccaaatgagattacaataccctcctctcctacttaactttctttttcttttttgagacagaacctcactccgttgcccaggctgtagtgcagtagcgcaatctcagctcactgccacctctgcctcttgggttcaagctatatttgcccytcagcctcccaggtagctgggattacaggcgtgcgccaccacatctggctaatttttgtatttttagtagagatggggtttcgccatgttggccaggctggtctcaaactcctggcctcccaaagtgctgggattacaggggtgagccacsgcgctcagcctactttaactttcattcactctaatatacaacccctctcagcctcaggaaaacgcaccactgaggttcatttttcagaaaataaatagaggaagtatgacataaaaggaatttatggcgggggtggggtgggggtgtcgttttccttcaaccccatcgctctaattgcttttaaactcccggactctttcaaaatgccttcctaacatttctctccaggctccttttgcttctctccgattctcttgtcattacagatgaaggcttcattagcgatatactgtattccatgtttattatactagtctgtccgaagagctcctactttttaatgtaatcttcatctcttaggcagcagctctagcccatttcctctcattcaagtaagaacaatacccgtccctatctccctgcgccccatcctgtgctctctttgtatttgtcccttagattcaaacaggatctaccccctctgcagcccttcaagaagaggtatgattgctaccacttttccccacaaagtgacgaaaggaaacagcgacggaagcgcaaccgaaccctggaattggtgtctcgactggtccattcccggcccacccccattaaccggctcgagccactcccaggacgaagtcaaggcctcggaaggcgactacaactcccagcaggtcgagcagctccgcccgcgctgattctccattggccttccgggggtggggattagatgggaggtggccgtggggctgcggccgggatttgtcccctcttcggcttccgtagaggaagtggcgcggaccttcatttggggtttcggttcccccccttccccttccccggggtctgggggtgacattgcaccgcgcccctcgtggggtcgcgttgccaccccacgcggactccccagctggcgcgcccctcccatttgcctgtcctggtcaggcccccacccmccttcccacctgaccagccatgggggctgcggtgtttttcggctgcactttcgtcgcgttcggcccggccttcgcgcttttcttgatcactgtggctggggacccgcttcgcgttatcatcctggtcgcagggtgagtagagggcccgggagacgcgggagagcgtcgaagagagaggtgcggaaggggctggaggaactggggcaagcctgggagcctgaattggggacgataagtcggaggtgaagtttgggcggaggtgaggggttgggtctgggagatttgtcctttcccgcagttggtttccaccttccaaggatctcacagattcctcctatattcctcccagcgacgtcagagaaggcccaaggccgagactcgtgagggggctgtgctgacctaggcaggccgagtcaggtgccttaggggaggatccaggaacggatacctcgcccttccgtgctcgcacactctggctgtcatcgctctgaagactctttaattagatttctcccctttccagtgcgttcacttttctacagatgagtctcttggtggagacagttaccctacctggtccatgtctccctaaccatccggaaggctaacttccacttttcaagcagctttggctggtttccctccttgatttctctggctcccactactattgcttgtctcactgcccctgtcttttctcagggcatttttctggctggtctccctgctcctggcctctgtggtctggttcatcttggtccatgtgaccgaccggtcagatgcccggctccagtacggcctcctgatttttggtgctgctgtctctgtccttctacaggaggtgttccgctttgcctactacaagctgcttaagtaagaagatggagtggtctggaggggagaggggcaaaggactgcactatgggaagtggggcagcccctgggtgctggtttggaagaggaggcactaagggaggacattagagggaaaggagcatccctgccctccctcatgtttcccctaccccaccccaccccaggaaggcagatgaggggttagcatcgctgagtgaggacggaagatcacccatctccatccgccagatggcctatggtgagccaagggagagggactggaggagggagttggacagccccctcctctagggaagtctctaaatatccacatgttctaagtggcttcttactttccttcatccgtcacttccaaagaaagttggtctggagggagagtagatgtgaaagaattgtaaccgggaatggggaggggtcagtggtgaacaggcaatagtgtgatctctgacattgatgagatcctcccttcccccagtttctggtctctccttcggtatcatcagtggtgtcttctctgttatcaatattttggctgatgcacttgggccaggtgtggttgggatccatggagactcaccctattacttcctgacttcaggtaagatccaccttctatctagcctttacccccyatccatccttgtccctgatctgatttattggcyttccctgagagacttctttggctcaacatctcaggagcctgggagaagatcagggatgtatctcctccccatctccctccctgcagcctttctgacagcagccattatcctgctccataccttttggggagttgtgttctttgatgcctgtgagaggagacggtactgggctttgggcctggtggttgggagtcacctactgacatcgggmctggtgagttggagacaggggcctgagttagggagaaaagcatttaatggtgagtgggatgtgggggaaagggtatcctcacttcttaacatttttaacttacctgggaggaggaggaaaggtgagtctttcaaggtctctcacctcagcatcatttctatcacctgctctggggaggaggttgaaaggattagtcaaactgtaatgcagagggcctgaggtgagcaggagcggcagaaacctttgagtttctgaggagctgaaaatcaaaagtccccttaaccacaagatgttggtgctctgaagggaaagactggagaatttgagagagatatctgggagtcagaaaggtacagagagaatatggggattargtcgagggagaatctaatctctttcctactcttaccctccttcctagacattcctgaacccctggtatgaggccagcctgctgcccatctatgcagtcactgtttccatggggctctgggccttcatcacagctggagggtccctccgaagtattcagcgcagcctcttgtgtaaggactgactacctggactgatcgcctgacagatcccacctgcctgtccactgcccatgactgagcccagccccagcccgggtccattgcccacattctctgtctccttctcgtcggtctaccccactacctccagggttttgctttgtccttttgtgaccgttagtctctaagctttaccaggagcagcctgggttcagccagtcagtgactggtgggtttgaatctgcrcttatccccaccacctggggacccccttgttgtgtccaggactccccctgtgtcagtgctctgctctcaccctgcccaagactcacctcccttcccctctgcaggscgacggcaggaggacagtcgggtgatggtgtattctgccctgcgcatcccacccgaggactgagggaacctaggggggacccctgggcctggggtgccctcctgatgtcctcgccctgtatttctccatctccagttctggacagtgcaggttgccaagaaaagggacctagtttagccattgccctggagatgaaattaatggaggctcaaggatagatgagctctgagtttctcagtactccctcaagactggacatcttggtctttttctcaggcctgagggggaaccatttttggtgtgataaataccctaaactgcctttttttcttttttgaggtggggggagggaggaggtatattggaactcttctaacctccttgggctatattttctctcctcgagttgctcctcatggctgggctcatttcggtccctttctccttggtcccagaccttgggggaaaggaaggaagtgcatgtttgggaactggcattactggaactaatggttttaacctccttaaccaccagcatccctcctctccccaaggtgaagtggagggtgctgtggtgagctggccactccagagctgcagtgccactggaggagtcagactaccatgacatcgtagggaaggaggggagatttttttgtagtttttaattggggtgtgggaggggcggggaggttttctataaactgtatcattttctgctgagggtggagtgtcccatccttttaatcaaggtgattgtgattttgactaataaaaaagaatttgtaattgtgggggaacttggcttttaagggaggggatagcatgttaattgagatttctgtcctcagatctctcatccagccactttcctaacctggcaaccactgatttccaagcatagccttggtgcaagggcagaaatctgggctagtggtttaacatgtctgaaactttgggttaagtgtyttcccagaagcttatctttccttccaggggtgggataaaaggagttaatcacccatgcttcttttccccatcctttgcccatctttaccacctgagggattcaggaacttgcccaccctcaagagcctcaaaggataggccagaattaaagtcagaaactttaatttccaaatatattgatcaaaaatatacaacttcaacagcaactctttatcctaaggagagatcccgcagtatatctagggaaagggccataaaagtgagggggtagaggactttggggtatatcccaaacttcccctgcaactaaacagagtttgttctctgcattaacaacacagcgatttcctcatttcctcctacatgtttggagaggctgaaggctctgcagttcttcctggaatgacagcctgggtccattcctctctaggagatgtccaggggaaggaggacatctgcttactactcctacagtgtttctggccagatcctacaccccattttagaggcttcctgataggcatgaagggaagtcatccacatccatggtatctgagaaggaatttatgcctcagtcgtggcttgtgctgaggtgaagaccacactctttcggttttccagcctcttcttcctggaaaggggaatggctcatgagaatgactgctatctaagtgaagcagattagaggtgaaataggagaatgctttttaacagaaaagagggctgggcaaggtgtttcacacctataatcccagcactttgggaggctgaggcgggcggatcacttgaggtcaggagttggagaccagcctgggcaatgtagtgaaaacccgtctctgctaaaaatacaaaaattatctgggcatggtggcacatgcctgtagtcccacctactcaggaggctgaggtgggaggaccacttgagcccgggaggtggaggttgcagtgagctgtgataaagccatgcactccagcctcgacaacagtgagaacctgtctcaaaaagcgggtggctcatgcctataatcccagtactttgggaggctgaggcaggcgaattgcctgaggtcaggagtttgagaccagcctggccaatatggtgaaaccttgtctctactaaaagtacaaaaattagctgggtgtgatggtgcgtgcctgtagtcccagctactcgggaggctgaggcaggagaattgcttgaacccagaaggcagaggttgcagtgagctgagattgcacaccactgcactccagactgagtaacagagcaagactccgtctcccacctaccaaaaaaaaaaaaaaaaaagaagaagggactggaggaatggaaagtagggcctcaccgaatctttctagcaatgaaataaacagccaggagaaggcagagacagccaaccaagattcctacacctagactcagcatttcacctgggggagataaaggtaaaaggtgtcagcctaggactaacatagattttgagcctttcccccactcggtgaggacacctcccctccccgcattatcttataaggctggcttacctgtggtatacgaggatcctgctgtaagagaagaaaatgggtcagtgggacttcagatccccatcccagctgggagcagcactctctgctgctgtgcctgggagaatcccccgggggcaccctggggtgggggttggttcccagtccaagcaagtcccagaaaccccctccccttttagccttttcttcccattggctccctagttcctgccattgtgtccccctcagtttcccatctcttctgagccgtgcagaatcaccttggatgaaagaagcaaagaccatgcgctgattgagaggctgaagggctcggtagttctgtaccagaagcttagagggctcctcttctgtggagaacaatgtcccctgaagcttttccagctgaggagcagaagcgtgggagaggtgttactttggggagtgggaaggggtctgaagttacaactgtgtctcacctcacctcgtttctccaccacttacctgttccattgaaatctgggaccttctataaaaaactgtccagagcacactctggtagcaagggggagttgtgagcgagccattgtagcggaagtactgccccagctgtttggggagcagctctcttaggttgaagggaggcactgaggtcttctgatctggggagaacagactgggactcatcttcctttcagtgtgccctagcttacctagatagggctcccagaagcaaaattccttggctctatgtaattgcttcatcccaaggcttttaaggatagtttttgaaagtctaatcttacttcctgctatagatttttaaggctcacctttatgcctgacttcatgcaagtgactcagaatgtgttcataagctatattcttagtctcacccacctggaagagaaggaaagggagagagtttggaatgagtccatgtttggaataagaaatttatgtacagaataaatggtcagggtgggctgctgcctgccataggaaggaggccagcaacagaaataggtttgagggttgcagaggaagtggagagaaacctggaagggactgggggctactgacctcaattaggatgcccaggacagccaggccctgaggcctctcagcagcctcactcaagctgtcataggaatcagagtcataatgtacaatgtggagctaaaggaaggaagagggaattgaatcatggaatgtctgcacccccttcaaggccttgatcctagctgccaccatccccccgctgtccccggcaggcactaagtctgtccctcagagattggccttatccccccagcatgacttttcctaaggtccagatcctttccccaggaccacccatccctgttactttgtctgagtcccagctctttgttccctggtacctctgcaaatgtggcttcactgttgatctggtgttctgacccccctggggatcctttctgaccccagtgcaggtggagctgggcagctacatattttcggggaagtccacccagatacagggtagagggcagagagagttgcactgtgaggaaaagagcaaactcggattggtggaggcatgtggatacattcccactcctgggttgccaccacttcttgggagacttggccctcttccagttttctcccccagtagcacccagttcctcccataggccagtgcttttctagcatatcttcctttttcttggtgaagaccaagtcagtgcaatgatacctacctactgagcttggttataaacatttcgattcccgctttggctacaggatcctgatccccattctcatatctccaaattcatggacaaaggtttttgagaattcgtaggttaggaaaatgctgctttcctctgactcctgaggttatttgtttgtttatttatgtcagatgggtaatgtgccaacatcttgacaagatttgagggcggcacatcttacgcatgctcaggaacaccccatcatcatgcccatgaactacaaaaggatctgactcctaagatctgagctggagcctacaactccttggagcctgtgcttttacctgtgtggccattgttgtgcaggtccaaaggctcggtgccaggctggtcatatccgtggggctgcagagcaggcaaatcagggtcaaatgtcacactgtctgtctgaatatcgatgggcgactgggcattgtttccacactcagggtaagaggctggccaatggtcctgaccatgtgggcctggtgggggttaccaaagacattggtcctgtcctccagctctagctacccttcaacagcaccccctccctttgacccttcccctaaccaagccatacatctgtgtggaggtagaaatggacttccctccacccaggttaagaccccagttgtatagggatgggtgaggtaggagtcctgttgagtctcatgctgcagttccccttccctacccagaggcagtgatgattccccaactatcctgatgaatggggagtggtagctcttttacttacctgtattttgaggacaagaaagctgaatgagggcagaggggatgcatagaaaacctgaataccctgagagatgggattagagagtaggagtagaaaaatgggagaaataaaatgatcctagataggccaggcacagtggctcatgcctgtaatcccagcactttgggaggccgaggcaggtggatcgcttgaggtcaggagttcgagaccagcctggccaacatggtgaaaccccatctctactaaaaatgcaaaaattagccagacgtggtggtgggcacctgtaatcccagctactcgagaagctgaggcaggagaatcacttaaacccaggaggtggagtttgcagtgagcccagattgcgccactgcactccagcctgggtgacagagcaagactctgtgtcaaaaaaaaaaaaaaaaaaaaaaaaaaaaatcctagagagatacggtctcctggaggcccctatcaagtggccttgggattcagatatcctgacttctcatcattcacttcttgctctcacactgaccgtttatcatgaacttgagtttggttaagtcattaatcagtagttcataggaactgagttccacctcccccagggtcagaaactatcctgccagcctcttcctcacccctgacctccagctctgtcccaatttcagatgcaggttaggggtaggatggattaggatagacggagccagaaggagacctggcagctaagctcagagttcccacccagcttcctttccaccccagctccctcactcctacacgatttactgaggacttaactagcttttctgccaaatcaggaggtgtaggatttgatgattagagcaggatctaggagccatatatgtgaaactcaaggcaggaggagatccagaagggaggagctagggtgagaaggtaaaggaagtctcctcccacccgcacagtgtgtcttcctgccaggtgaggaggtcccagtgtgaaagggttgtcgggaggccttgagatctgctcaccctcatacgtccagtgttgacctgcaaggcagaatagtttgggttacagccagcgcagcctggggcagaaccctggcctccacactcccctccctctggcattctgtactgctccacctccctctctgcagtctctcctccctctgctccagcactttgcaaaggaagccctgaaaccggacacctctgtggaaaggtcggggggcctatttaaaatcaccagccaggctgtgttggtgcctgccgagtaaaaggggaggaggaaggaaaagaggtaaagcccagagactaaaattaacctggatccaaatgtgcgattggcccaaccctttcttttctgtaacctgtgccaagtcaatctaacacttagaagattggggtgggtggggtgagggtgtgggcagagggttggaaggatagggactagaaagcggggaggagaaaggagtttagagtgtgtgtgtgttggggggtgctactgaggggagaaggggagattattcctttgctttaaaaaattgcatgaataaagccactgagctgtaaactcatatgtaaattcttcttttctggtcccattagctctagaggaaactcctcatcaccaggaggctctgctccctacattctgagatggttagggaagggtgggagtcagggcagggtctactctagattgagggtggtgggtgggcacaggcagccaggctggcagggacaggatgaaagtgaagcattgtgtgtagagaagagagctgccagctgggtcacatgccaggctctcgtgcagtcctgtctgacgcaaaggctgagggtctgcaggtccagcccctccctacggccaaactgcctcaagaagaaaacgaaggccttcatggtttatgctgcaatattcatactactagaaactctggagaaaaatcctaaattccttcctctctctgtctcttattcccttaaattcctcaaacttgtgagatgtcctgctcttatccttgacctattctgctagcccaagggagagctggaggcagcctctcattttaccatatctgtgggaccccccaacaactcaaac

SEQ ID NO: 95867 - DNA, 19770 bp, Homo sapiens
tatttcaacaaacagtattttgcattagtatatattattttagtgttatactttctcataaaataatgagtttactttcaatatgtgttttttaagagcttgctacactcactaatgtagcctttacttatctttaagccaaaatttcctccaaatgaacatatctctcattttattctgaaagtccatgaaaggatgatattcactgtacagaaatttaaccatgttacaagtgaattttatttctgtatgatagctaaaaggtcacaagggaaagaaaaatattgaatttttgcctagtgtgaaacaccaattgtagagtcctttgtttatctccccaaagaagaaaagagtaacaacttgtataaataccattggaggagtataacctttatggaaggcaatatggtaacaaatatagcaaaaaccctttaaaaagttgatatcctaaattaaaaccaaaatgagataccattatacactagaagaatagctacttttttcttttttttttttttttttgagacggagtcctgctcttgtcgcccaggctggagcacaatggcatgatctcggctcacttcaacctctgcctcccaggttcaagagattctcctgcctcagcctctagaatagctgggattacaggcacgagccaccacacctgactaatttttgtatttttagtaaagacggggttttgccatgttggccaggctggtctcgaactcctgacctcatgatgcgcccgccttggcctcccgaagtgctgggattacaggtgtgagccaccgtgcccggctgtaccttttttttttttttaaacggacaatatcaaatgcttgtaaagatgaggacaactagaactcatacattgctggtgggaaagaaaaactgtataagcactatgaaaaacagtctggggaccaggtgcaatggctcacgctggtaatcccaacactttggaaggcctaggcaagagaatcacttgaacctaggagatgagaccagcctaggcaacatggcaagaccccatctctattaaaaaaaataaaatagtctgggcgcggtggctcacacctgtaatcccagcactttgggaggctgaggcaggtggatcatgaggtcaggagttagagaccagcctcgccaagatggtgaaactctgtctctactaaaaatgcaaaaattagccagacatggtggcacgtgcctgtagtcccagctacttgggaggctgaggcaggagaattgcttgaacctgggaggcagaggttgccagtgagccatgatcatgccactgcactccagcctgggaaacagagcaagactccgtctcaaaaaataaataaataaataaataataaaataaaagaggccaggcatggtggctcatacctgtaattctaacactttgggaggctgaggcaggagaattacttgagccaggagttcaagaccaacctaggcaatatggtgaaaccttgtctctacaaaaaaattaaaaaattagctgggagtggtggcatgaacctgtagtctcaggtgcttgggagctgaggtgggaggatcgcttgagcccaggaagggaaggctgcagtgagccaagatcacgccactgcactccaacctggacaacagagccatgccgtctcaaaagaaaagaaagtaaaagaaaaacagcccggcagtttttttacaaagttaaacatacgcttcccgtacaatccagcactcagtatctatttattcccactcctaggtatttactcaagaacaataaaaacatatgtctgctcaaagacctgtactcaaatacttatagtgcttttattcatggtgactagaaagaagtggctgcggtggctcatgcttataatctcagcactttgggaggccaagctgggcaaatcactcgagcccaggagttcgagaccagcctgggaaacatgacaaaattttgtctctacaaaaactaagaaaatttttaaaacctgccagtcatggtggcatgcgcatgtagacctagctactcaggaggctgagaagaggatcatttgagtttgaggctgaagtgagctatgattctgccactgcactccagcctaggggacagagtgagaccctgcttccaaaaaaaaagagagaggctgggcgtggtggctcacacctgtaatcccagcactttgggaggctgaggcaggcagatcacctgaggtagggagttcaagactagcctgatcaacatggagaaaccccgtctctactaaaaataccaaattagccgggcgtggtggcaaatgcctgtaatcccagctacttgggaggctgaggcacgagaatcacttgaacctgggaggcagagtttacggtgagccaagatcatgccattgcactgcagcttgggcaacagagtgagactctgtttttttttttttttttttgagatggagtctcgctctgttgcccgggctagagtgcaatggcgctatctcggctcactgcaaactcctcctcctgggttcaagcggttctcctgcctcagcctcccgagtagctgggactacaggcgtgagccaccgcgcccagctgagactgtcaaaaaaaaaagagagagagagagagagagaaagagaaatgctaatttctctaatgccaaatctctaatgtagatttggacacacccagaactatagaatcgggtactatgggggtgaggtccagaaatctctatttatttattctattttatctttgagatagagttttgctcttgtcacccaggctggagtgcggtggtgcagtctcggctcaccgcaacctctgcctcccaagttcaagcgattctcctgccttagcctcccaagtagctgggattacaggcacccgctaccacacctggctaatttttttgtatttttggtggagatggggtttcgccatattagccaggctggtctcaaattcctgacctcaggtgatctgcccgcctcggcctctcaaagtgctgggattacagacatgagccactgcacctggccagaaatctgtattttaataagctttccaagtttaaaaagctttccaggtgattctgatgcacattgacatttgagaaccaatggtgtaggagaaagctcactggtgcctgtgtccttgttctggtttagcctagcagctatatgactaaccatggctaaatccctaaatctctcaaaactcagttttacagggtataacaaggggtttagaatgatgcctgagggcccttctgctctaaaattctgtgaaagacagtaaataaatgttgcaattactagattcattcaatcaacagttatgtaccaggcagcgttctgttcatggaatcaatgtataacacaaaattgcaactgaaatagtgtaacttatcgcttataattaaatgacttgcaaattttcagaccacaaacttttaccggtcctcaatttacaagattctcatactacatttgttgtgtaatgtgaactggaaaactaagaaaatgatccaaagggtcattttttccaaaattacttaattcttttttgtttgtttgttttttcttttttgtttttgtgacagagtctcactctgtcacccaggctggagtgcagtggagcaatctcaactcactgcaacctcccactcccgagttcaagcaattctcctgcctcagcctcctgcgtagctgggattacaggcatgcaccaccacgcctggctaatttttgtatttttagtagagacgaggttttgctatgctttggccaggctggtctggaactcctggcccacctgcctcggcctcccaaagtgctggcattacaggcgtgagccaccacgcctcatctcagtcaagtttcagtatatctacaaggacaggagatggcgccagaaggcagtgagatgcttggttttggttttaacggttttagccaatgcaagcaaggaaagggcttgagagagaggtcagaactaaaacaaaggtgccagagtttgagtggaaactaagactgagtggggagagggagctgtgtcagttttttttttttttaacttacatataagggtccccttgacacctactccaaatcagcacagctagaaagcaacaaaagaaatatccacagtaaagccaaagatcaagataaagtcaagtgcctggaggacggcgctcgccttctggctccctctgtcctagaaaggagggcctttgtcgtctgggaagcataagcacctggatgcgttgctcacccaagatcagggaagtgttgattccaggctaagatatctttgtgaaacaatgttcagttgcgtaggcaaaatcccaaagcccagcagcagtgaaatacctcccagaaggaaccacatacacaaagcattttaaattaaaatttaaaaattcatagacgagccaggaggtggcgcctggcaagacacgctatctgccttggaaatcggaatctcagctcagcgctccaggggaactctgttccggcagaggtcattctgttcagacctcttctttcctactaaatctcttctttcataccaagatgtctctgctttctttttttgtttctttgtgttaagtaccctgattcccgggaaatctaatttatacttcaagtcttttactcttcttagatgggatggatggggctttggggaacctcaaaacataaaactttcctgaaggggacaaataactcagagggtgataggagaagaaaaagggaaatgacatcagcaaaatggcttggctttgcagatcaatcacaggggatagaaaggcacagtgagctcctgtctctgcaggagctgatgatccagcacatgcattattctgttcatttggcttttatcctgctcccttatttagcttctgctccctttgtttggctatttattgctactcggcaggagcaaggagggcagagggagcttcagatgggtgcatcctcctggctggtgcctctggtgaagagcatggaggagaaagagrtttcaatgtctggcttgaaagtatctgtgggtttcacattctctaacgagggatttaggatgtacattccaatcgggatttccagtcccgtggggagcaaacatcagttcacattcctgagacgtgcagcctccatsctccacggacgcagctccttggtggcaggtttcattcagtgccacatgtcctgcctcagccctttgttgggctggaaggaagaccctgagcccctcttccatctggatcacatggtctctccagaccctcccctctctttctctggaaaccacctttttctgatggtggtagtgattgttcctaaagtctctcctttcctcctgccctggcctctctgccggaggtcagtgtcctcttcagtgacaaaagccgccctaratctgggctccctggagagggaggtggctgggtctggcagttacagccgctgtctctccatggtgctgctacacccctcccccactgggcatacaaatgggctttatccagcaaacaacgctccctccccgcactccccccaccccaggccacacaggcacgtggacccaggcctcaccgtgggaagggggtggtggcaggcacagaagagattgctccagatgagttctccttgcctcacttctcttccttagaacttaggacacaactcaggttttagttattgacttcctccacccctcccctgcaccctgagtccctaattccttcttgttatatatctcctaattctggactcttcccattccagggcagctcagattatgcagggaattgggaacaggtacccccaccatctgccgcataccacccagggagctgctcctcagaggagaaatcaggcggggggatgaaaatacagtgtccttttgagggggctgagttgaaccccaaagccccttccttgaccctgcctgctccagggaacacccatctaaacagcatctgtgtgactagcagaggaaggaagagctcaccccagctgggctcctgagccagggccagggctccagtgaaacttgccgcgctccagctccgagtggggccatcctgcatgcctaattggctatttaaggagctgttcaccagcagcccaggcagcacccccgtccccacatacaccagttcagagccaccttaaaagcaggaggcagttgtaaagtcgctggccagctagtggagtggagactgcagagggagataaagagagagggcaaagaggcagcaagagatttgtcctggggatccagaaacccatgataccctactgaacaccgaatcccctggaagcccacagagacagagacagcaagagaagcagagataaatacactcacgccaggagctcgctcgctctctctctctctctctcactcctccctccctctctctctgcctgtcctagtcctctagtcctcaaattcccagtcccctgcaccccttcctgggacactatgttgttctccgccctcctgctggaggtgatttggatcctggctgcagatgggggtaggtacaactaaatgtctgtgtgtggatttgtgctgatgttcacatgtcgccaggtgtgcttaatggggggaggagaggtgtgaaaggaagcctagaggctggaataataggctcagagatgaggaaaaaagagtggggtgtggaggagaccacttcccttctttaccttttgtctctccagccttgttgttattggaggtcggggagaactagcggcaggcaggcagagtgtgtacacatgcaagtgctggaatctctttgcaggctacagattttctccagagctctttcccccactgccctggtcccaggcaggactcctggacttctttatttacaaactcctccaaatagggagtcaaagaggcctggagtaaaaagatggatagatgggggtagggggaagaatacttcctgcccaactcagaccctgatctccaattcatccccttttggccaagattccctcttcattctgtggagcgactaactccccagttatcctctgaaagtggcagtaagagtcaacatttgtttgacattttacagtttacaaaggactttcaggagctcccaggagatgaggagggattcttgggagaacaggctgaagcgctccaggagtgtccccaggaactcctagacctcatttttgtgtttcctgtgcctagcacagtgtccagcacatactaggtgtgtaactgaggtttgtggaaagagcagggtgaggtgggtgtccagagagcagaaggcaaatgcagagaggatgggggcaggcaggcagccaaatggagagtcacaaatctcatctgaggagaaagaaaaaaagagggaaagaggaggaagagacagaataagtgtgttgaggctctgaccagagtggacaggcacctttacagaccagggagtttgagttgttggggggtcccacagatatggtaaaatgagaggctgcctccagctctcccttgggctagcagaataggtcaaggataagagcaggacatctcacaagtttgaggaatttaagggaataagagacagagagaggaaggaatttaggatttttctccagagtttctagtagtatgaatattgcagcataaaccatgaaggccttcgttttcttcttgaggcagtttggccgtagggaggggctggacctgcagaccctcagcctttgcgtcagacaggactgcacgagagcctggcatgtgacccagctggcagctctcttctctacacacaatgcttcactttcatcctgtccctgccagcctggctgcctgtgcccacccaccaccctcaatctagagtagaccctgccctgactcccacccttccctaaccatctcagaatgtagggagcagagcctcctggtgatgaggagtttcctctagagctaatgggaccagaaaagaagaatttacatatgagtttacagctcagtggctttattcatgcaattttttaaagcaaaggaataatctccccttctcccctcagtagcaccccccaacacacacacactctaaactcctttctcctccccgctttctagtccctatccttccaaccctctgcccacaccctcaccccacccaccccaatcttctaagtgttagattgacttggcacaggttacagaaaagaaagggttgggccaatcgcacatttggatccaggttaattttagtctctgggctttacctcttttccttcctcctccccttttactcggcaggcaccaacacagcctggctggtgattttaaataggccccccgacctttccacagaggtgtccggtttcagggcttcctttgcaaagtgctggagcagagggaggagagactgcagagagggaggtggagcagtacagaatgccagagggaggggagtgtggaggccagggttctgccccaggctgcgctggctgtaacccaaactatwctgccttgcaggtcaacactggacgtatgagggtgagcagatctcaaggcctcccgacaaccctttcacactgggacctcctcacctggcaggaagacacactgtgcgggtgggaggagacttcctttaccttctcaccctagctcctcccttctggatctcctcctgccttgagtttcacatatatggctcctagatcctgctctaatcatcaaatcctacacctcctgayttggcagaaaagctagttaagtcctcagtaaatcgtgtaggagtgagggagctggggtggaaaggaagctgggtgggaactctgagcttagctgccaggtctccttctggctccgtctatcctaatccatcctacccctaacctgcatctgaaattgggacagagctggaggtcaggggtgaggaagaggctggcaggatagtttctgaccctgggggaggtggaactcagttcctatgaactactgattaatgacttaaccaaactcaagttcatgataaacggtcagtgtgagagcaagaagtgaatgatgagaagtcaggatatctgaatcccaaggccacttgataggggcctccaggagaccgtatctctctaggatttttttttttttttttttttttttttttgacacagagtcttgctctgtcacccaggctggagtgcagtggcgcaatctgggctcactgcaaactccacctcctgggtttaagtgattctcctgcctcagcttctcgagtagctgggattacaggtgcccaccaccacgtctggctaatttttgcatttttagtagagatggggtttcaccatgttggccaggctggtctcgaactcctgacctcaagcgatccacctgcctcggcctcccaaagtgctgggattacaggcatgagccactgtgcctggcctatctaggatcattttatttctcccatttttctactcctactctctaatcccatctctcagggtattcaggttttctatgcatcccctctgccctcattcagctttcttgtcctcaaaatacaggtaagtaaaagagctaccactccccattcatcaggatagttggggaatcatcactgcctctgggtagggaaggggaactgcagcatgagactcaacaggactcctacctcacccatccctatacaactggggtcttaacctgggtggagggaagtccatttctacctccacacagatgtatggcttggttaggggaagggtcaaagggagggggtgctgttgaagggtagctagagctggaggacaggaccaatgtctttggtaacccccaccaggcccacatggtcaggaccattggccagcctcttaccctgagtgtggaaacaatgcccagtcgcccatcgatattcagacagacagtgtgacatttgaccctgatttgcctgctctgcagccccacggatatgaccagcctggcaccgagcctttggacctgcacaacaatggccacacaggtaaaagcacaggctccaaggagttgtaggctccagctcagatcttaggagtsagatccttttgtagttcatgggcatgatgatggggtgttcctgagcatgcgtaagatgtgccgccctcaaatcttgtcaagatgttggcacattacccatctgacataaataaacaaacaaataacctcaggagtcagaggaaagcagcattttcctaacctacgaattctcaaaaacctttgtccatgaakttggagatatgagaatggggatcaggatcctgtagccaaagcgggaatcgaaatgtttataaccaagctcagtaggtaggtatcattgcactgacttggtcttcaccaagaaaaaggaagatatgctagaaaagcactggcctatgggaggaactgggtgctactgggggagaaaactggaagagggccaagtctcccaagaagtggtggcaacccaggagtgggaatgtatccacatgcctccaccaatccgagtttgctcttttcctcacagtgcaactctctctgccctctaccctgtatctgggtggacttccccgaaaatatgtagctgcccagctccacctgcactggggtcagaaaggatccccaggkgggtcagaacaccagatcaacagtgaagccacatttgcagaggtaccagggaacaaagagctgggactcagacaaagtaacagggatgggtggtcctggggaaaggatctggaccttaggaaaagtcatgctggggggataaggccaatctctgagggacagacttagtgcctgccggggacagcggggggatggtggcagctaggatcaaggccttgaaggggrtgcagacattccatgattcaattccctcttccttcctttagctccacattgtacattatgactctgattcctatgacagcttgagtgargctgctgagaggcctcagggcctggctgtcctgggcatcctaattgaggtcagtagcccccagtcccttccaggtttctctccacttcctctgcaaccctcaaacctatttctgttgctggcctccttcctatggcaggcagcagcccaccctgaccatttattctgtacataaatttcttattccaaacatggactcattccaaactctctccctttccttctcttccaggtgggtgagactaagaatatagcttatgaacacattctgagtcacttgcatgaagtcaggcayaaaggtgagccttaaaaatctatagcaggaagtaagattagactttcaaaaactatccttaaaagccttgggatgaagcaattacatagagccaaggaattttgcttctgggagccctatctaggtaagctagggcacactgaaaggaagatgagtcccagtctgttctccccagatcagaagacctcagtgcctcccttcaacctaagagagctgctccccaaacagctggggcagtacttccgctacaatggctcrctcacaactcccccttgctaccagagtgtgctctggacagttttttatagaaggtcccagatttcaatggaacaggtaagtggtggagaaacgaggtgaggtgagacacagttgtaacttcagaccccttcccactccccaaagtaacacctctcccacgcttctgctcctcagctggaaaagcttcaggggacattgttctccacagaagaggagccctctaagcttctggtacagaactaccgagcccttcagcctctcaatcagcgcatggtctttgcttctttcatccaaggtgattctgcacggctcagaagagatgggaaactgagggggacacaatggcaggaactagggagccaatgggaagaaaaggctaaaaggggagggggtttctgggacttgcttggactgggaaccaacccccaccccagggtgcccccgggggattctcccaggcacagcagcagagagtgctgctcccagctgggatggggatctgaagtcccactgacccattttcttctcttacagcaggatcctcgtataccacaggtaagccagccttataagataatgcgggraggggaggtgtcctcaccgagtgggggaaaggctcaaaatctatgttagtcctaggctgacaccttttacctttatctcccccaggtgaaatgctgagtctaggtgtaggaatcttggttggctgtctctgccttctcctggctgtttatttcattgctagaaagattcggtgaggccctactttccattcctccagtcccttcttcttttttttttttttttttggtaggtgggagacggagtcttgctctgttactcagtctggagtgcagtggtgtgcaatctcagctcactgcaacctctgccttctgggttcaagcaattctcctgcctcagcctcccgagtagctgggactacaggcacgcaccatcacacccagctaatttttgtacttttagtagagacaaggtttcaccatattggccaggctggtctcaaactcctgacctcaggcaattcgcctgcctcagcctcccaaagtactgggattataggcatgagccacccgctttttgagacaggttctcactgttgtcgaggctggagtgcatggctttatcacagctcactgcaacctccacctcccgggctcaagtggtcctcccacctcagcctcctgagtaggtgggactacaggcatgtgccaccatgcccagataatttttgtatttttagcagagacgggttttcactacattgcccaggctggtctccaactcctgacctcaagtgatccgcccgcctcagcctcccaaagtgctgggattataggtgtgaaacaccttgcccagccctcttttctgttaaaaagcattctcctatttcacctctaatctgcttcacttagatagcagtcattctcatgagccattcccctttccaggaagaagaggctggaaaaccgaaagagtgtggtcttcacctcagcacaagccacgactgaggcataaattccttctcagayaccatggatgtggatgacttcccttcatgcctatcaggaagcctctaaaatggggtgtaggatctggccagaaacactgtaggagtagtaagcagatgtcctccttcccctggacatctcctagagaggaatggacccaggctgtcattccaggaagaactgcagagccttcagcctctccaaacatgtaggaggaaatgaggaaatcgctgtgttgttaatgcagagaacaaactctgtttagttgcaggggaagtttgggatataccccaaagtcctctaccccctcacttttatggccctttccctagatatactgcgggatctctccttaggataaagagttgctgttgaagttgtatatttttgatcaatatatttggaaattaaagtttctgactttaattctggcctatcctttgaggctcttgagggtgggcaagttcctgaatccctcaggtggtaaagatgggcaaaggatggggaaaagaagcatgggtgattaactccttttatcccacccctggaaggaaagataagcttctgggaaracacttaacccaaagtttcagacatgttaaaccactagcccagatttctgcccttgcaccaaggctatgcttggaaatcagtggttgccaggttaggaaagtggctggatgagagatctgaggacagaaatctcaattaacatgctatcccctcccttaaaagccaagttcccccacaattacaaattcttttttattagtcaaaatcacaatcaccttgattaaaaggatgggacactccaccctcagcagaaaatgatacagtttatagaaaacctccccgcccctcccacaccccaattaaaaactacaaaaaaatctcccctccttccctacgatgtcatggtagtctgactcctccagtggcactgcagctctggagtggccagctcaccacagcaccctccacttcaccttggggagaggagggatgctggtggttaaggaggttaaaaccattagttccagtaatgccagttcccaaacatgcacttccttcctttcccccaaggtctgggaccaaggagaaagggaccgaaatgagcccagccatgaggagcaactcgaggagagaaaatatagcccaaggaggttagaagagttccaatatacctcctccctccccccacctcaaaaaagaaaaaaaggcagtttagggtatttatcacaccaaaaatggttccccctcaggcctgagaaaaagaccaagatgtccagtcttgagggagtactgagaaactcagagctcatctatccttgagcctccattaatttcatctccagggcaatggctaaactaggtcccttttcttggcaacctgcactgtccagaactggagatggagaaatacagggcgaggacatcaggagggcaccccaggcccaggggtcccccctaggttccctcagtcctcgggtgggatgcgcagggcagaatacaccatcacccgactgtcctcctgccgtcgscctgcagaggggaagggaggtgagtcttgggcagggtgagagcagagcactgacacagggggagtcctggacacaacaagggggtccccaggtggtggggataagygcagattcaaacccaccagtcactgactggctgaacccaggctgctcctggtaaagcttagagactaacggtcacaaaaggacaaagcaaaaccctggaggtagtggggtagaccgacgagaaggagacagagaatgtgggcaatggacccgggctggggctgggctcagtcatgggcagtggacaggcaggtgggatctgtcaggcgatcagtccaggtagtcagtccttacacaagaggctgcgctgaatacttcggagggaccctccagctgtgatgaaggcccagagccccatggaaacagtgactgcatagatgggcagcaggctggcctcataccaggggttcaggaatgtctaggaaggagggtaagagtaggaaagagattagattctccctcgacctaatccccatattctctctgtacctttctgactcccagatatctctctcaaattctccagtctttcccttcagagcaccaacatcttgtggttaaggggacttttgattttcagctcctcagaaactcaaaggtttctgccgctcctgctcacctcaggccctctgcattacagtttgactaatcctttcaacctcctccccagagcaggtgatagaaatgatgctgaggtgagagaccttgaaagactcacctttcctcctcctcccaggtaagttaaaaatgttaagaagtgaggataccctttcccccacatcccactcaccattaaatgcttttctccctaactcaggcccctgtctccaactcaccagkcccgatgtcagtaggtgactcccaaccaccaggcccaaagcccagtaccgtctcctctcacaggcatcaaagaacacaactccccaaaaggtatggagcaggataatggctgctgtcagaaaggctgcagggagggagatggggaggagatacatccctgatcttctcccaggctcctgagatgttgagccaaagaagtctctcagggaargccaataaatcagatcagggacaaggatggatrgggggtaaaggctagatagaaggtggatcttacctgaagtcaggaagtaatagggtgagtctccatggatcccaaccacacctggcccaagtgcatcagccaaaatattgataacagagaagacaccactgatgataccgaaggagagaccagaaactgggggaagggaggatctcatcaatgtcagagatcacactattgcctgttcaccactgacccctccccattcccggttacaattctttcacatctactctccctccagaccaactttctttggaagtgacggatgaaggaaagtaagaagccacttagaacatgtggatatttagagacttccctagaggagggggctgtccaactccctcctccagtccctctcccttggctcaccataggccatctggcggatggagatgggtgatcttccgtcctcactcagcgatgctaacccctcatctgccttcctggggtggggtggggtaggggaaacatgagggagggcagggatgctcctttccctctaatgtcctcccttagtgcctcctcttccaaaccagcacccaggggctgccccacttcccatagtgcagtcctttgcccctctcccctccagaccactccatcttcttacttaagcagcttgtagtaggcaaagcggaacacctcctgtagaaggacagagacagcagcaccaaaaatcaggaggccgtactggagccgggcatctgaccggtcggtcacatggaccaagatgaaccagaccacagaggccaggagcagggagaccagccagaaaaatgccctgagaaaagacaggggcagtgagacaagcaatagtagtgggagccagagaaatcaaggagggaaaccagccaaagctgcttgaaaagtggaagttagccttccggatggttagggagacatggaccaggtagggtaactgtctccaccaagagactcatctgtagaaaagtgaacgcactggaaaggggagaaatctaattaaagagtcttcagagcgatgacagccagagtgtgcgagcacggaagggcgaggtatccgttcctggatcctcccctaaggcacctgactcggcctgcctaggtcagcacagccccctcacgagtctcggccttgggccttctctgacgtcgctgggaggaatataggaggaatctgtgagatccttggaaggtggaaaccaactgcgggaaaggacaaatctcccagacccaacccctcacctccgcccaaacttcacctccgacttatcgtccccaattcaggctcccaggcttgccccagttcctccagccccttccgcacctctctcttcgacgctctcccgcgtctcccgggccctctactcaccctgcgaccaggatgataacgcgaagcgggtccccagccacagtgatcaagaaaagcgcgaaggccgggccgaacgcgacgaaagtgcagccgaaaaacaccgcagcccccatggctggtcaggtgggaaggkgggtgggggcctgaccaggacaggcaaatgggaggggcgcgccagctggggagtccgcgtggggtggcaacgcgaccccacgaggggcgcggtgcaatgtcacccccagaccccggggaaggggaagggggggaaccgaaaccccaaatgaaggtccgcgccacttcctctacggaagccgaagaggggacaaatcccggccgcagccccacggccacctcccatctaatccccacccccggaaggccaatggagaatcagcgcgggcggagctgctcgacctgctgggagttgtagtcgccttccgaggccttgacttcgtcctgggagtggctcgagccggttaatgggggtgggccgggaatggaccagtcgagacaccaattccagggttcggttgcgcttccgtcgctgtttcctttcgtcactttgtggggaaaagtggtagcaatcatacctcttcttgaagggctgcagagggggtagatcctgtttgaatctaagggacaaatacaaagagagcacaggatggggcgcagggagatagggacgggtattgttcttacttgaatgagaggaaatgggctagagctgctgcctaagagatgaagattacattaaaaagtaggagctcttcggacagactagtataataaacatggaatacagtatatcgctaatgaagccttcatctgtaatgacaagagaatcggagagaagcaaaaggagcctggagagaaatgttaggaaggcattttgaaagagtccgggagtttaaaagcaattagagcgatggggttgaaggaaaacgacacccccaccccacccccgccataaattccttttatgtcatacttcctctatttattttctgaaaaatgaacctcagtggtgcgttttcctgaggctgagaggggttgtatattagagtgaatgaaagttaaagtaggctgagcgcggtggctcacccctgtaatcccagcactttgggaggccaggagtttgagaccagcctggccaacatggcgaaaccccatctctactaaaaatacaaaaattagccagatgtggtggcgcacgcctgtaatcccagctacctgggaggctgaggggcaaatatagcttgaacccaagaggcagaggtggcagtgagctgagattgcgctactgcactacagcctgggcaacggagtgaggttctgtctcaaaaaagaaaaagaaagttaagtaggagaggagggtattgtaatctcatttggatggggagaggttagtccttagggaagatgttaggcaaaggaatctgaggatggaaaagaggaaagaaatctggaatattgtttttgaaagcataatcaaagtaccaaaaaaaaaccccacagaaattgtttaaagataaccaaacttcctttccttcctggaagtgatttattatttaatccatatgtgcacactcacatacatgttttacatgtcttccaggatattctggaaaggagctgaggaatagattgtatagatttacacggaggctggtcacagtggctcatgcctgtaatcccagcactttcggaggccaaggcggctggatcacttgaggtcaggagtttgagactagcctggccagtgtggtaaaaccccatctctactaaaaatacaaaaaattagccaggcatggtggtgcgcacctgtagtcccagctactcaggaggctgagccacgagaatagcttgaatctgagaggtggaggttacagtgagctgagatcccaccactgcactccaacctgggcgacagagcaagactctgtctctgaaaaaaaagaaagaaaatatttacatggaaagtcaccaggcaaattattccctaatgagactaagagggtagctgggcgcagtggctcacgcctgtaatcccagcactttgggaggtcgaggcaggcagatcacgaggtcaggagatcgagaccatcctggctaacacgatgaaaccccgtttctactaaaaatacaaaaaattagccaggcgtggtggcgggcgcctgtagtcccagctactcaggaggctgaggcaggagaatggcgtgaacccaggaggcggagcttgcagtgagccgagatcgtgccactgcactccagcctgggcaacagagtgagactccgtctcaaaaaaaaaaaaaaaaaaaaattaagagggtagcgttatcatgacctgtgttcaagactccagtatgtcctgcttctgagcccagcaggcagagtaaggtggataggaatgagacaattctcatgtcttttttttttgagatggagtctcactctgttgcctagactggagtacagtggtgctatctcggctcactgcaacctctgcctcccaggttcaagtgattctcctgcttcagcctccctagtagctgggattactggcgcctgccaccaagcccagctaatttttgtatttttagtagagacaaggtttcaccatgttggccaggctgatctcctgacctcaggtgatctgtccgcctaagcctcccaaagtactgggattacaggcgtgagccac

SEQ ID NO: 95868 - DNA, 17711 bp, Homo sapiens
  misc_feature (1)...(17711): n = A,T,C or G
agagaagccatagggttccccagtttatgcccaccctcgtctggcctcctagcacgagcagtcagtccctcccctggaaggaaaggctgaagggaccacccaagcgcttggtccaactcaccccgtttctgcaggcctgctcgttcagcgctcgcacccaagcccgctgccagttctcccggaaagacttgaaggcgaagagtgacgccaggaggccccggactcctggctcctcggcggcgccagcccgagtcgcccgcagccgcagcagcgagcgccacacgcccagctcccgcagggaacccgcgggttccccggctaaggcgggtcccgggccccggtccccgcgggcccgcgccagccacaagccccgggcatattgcagcagccaggcgaacaccgtgagcagcgaggcggcgaagaggatcagcaaggccgcccagcccacgtcccgctgcccccagcccggatccatgctccgcgcgggctccgatcccggtcccggctggggctcakccgctgccccgggggagcatggcccgggcgggccgcggggaggaggtgggctcccccggggctgggcgcgcggggtcgggggctctccgcgactgagtgyccaggactagtgggtgccacagggcgaggagaggaggtcctcgggggtcgcgatgccggggtctctgtctccgtggtccgggtctctcctagcttggtcagcagtcggacccgttagtcgccggccagtgcccgactcctcccaccgcgcgggccccgccggaccctggaggggactgstctgcagagacgctggggctcgcgggccggcaccggctccgggagggctgcgtgcgcagagctgacactgacaacaccgccggcgccccgcccccacccgcccttaaaggagccgcacccgcgccgggcggggccaggacagcctggcgctccctcgctggaggagggcgggagggctagcagcgagcggaggaggttccggggtggaaaataggcgggatctttgatcacctcgccccatcttgcaatcgcggtgctcccacactcagctcaaggcaagagtaacttcacttacctaagatgctgcctttgctttcccctatgcttgttagatttccacaggtcggacgcctgtgaggttaagaaggaggtgacccctgtggaaatcaccgcccccttctcccaacacccccagactcagcgacttctagcttcccatttcctgggggaagctaggcccagggtaaggagacgcagagcgtccctcccagatagaagtgtctggcagaggtccagctgatgtcaacagagagaaagcagaacctgaagctgggagaggttgagagtagaacaccgaatttgaattccccccaccatcatcaccmtccttcctcttggagcttggacccagaaacagccccrttaacctccttgctcgtgtaggtttgttctggagattcccaagcccaggctgtgtgtctgtttttaaaaataatgtatttccatagtaacagctcctgcctatggagcacgtgtagagggggtggtaatgacaagggagctggcaatgtagcactggactatcaatagattcagccacaagaccttgccactctaagtatgtgatatcccaacaagctcccaagaaatggtgctgtaggtacactgcccaacctctggcctcagaagccatcttttcctagactcaaggagttgattcaacctctacaggactggggctcatcaatgcttgctgaggacaggggaaggaaatacctgcaaaaggattcaaaggaatcctgggggaattcacattctcccaagagccccttcttcatacatgtgggaaggtctttggcacacagtccctttcttaaagaggtaggatggaaaggtgttaagtatctttctcccaaacccaagtagttgtctgaggaatgagcacatgagaataagagaataaacaatgccttctgaagtgtgggatggcagggctagacagaaactgacaggtcagcaacaggtttgtctgagccagaggaggtggtggggtagcctgggcctccctagatttccctgtaaggaatgatggggagaggtgggggtgaatgaggtaacctcctgtggccctgcccatgcattgtcactggactgccaaatcagtggagattcctagagtctgggtttctaatctcaaagggaggagaagacatgaaatcaagggaggagagaactcagggccagaaccagggatgcaggaggaagctgtcagtgggaagagcagctagggtttaggggagcaggttatgcaggaagttgtccaggtagaagctttccctatgaagaccctcttcccccaagaatccttcaggaaccctcagaccccctagtgatctccattctctgacttctttgatttattccctcaacttctccactgagtgcttggtcctatgctgccagatactgcttcacaattcagtatctgaactgtgagtctacctagttacatgagtctccctagttagtcctccctcttttttttttttttttctcttttcttgagacagaaagtcactgttgcccaggctggggtgcagtagcgagatcttggctcactgcaacctccacctcccaggtttgagtgattctcctgcctcagcctaccaagtagttgggactataggcatgcgccatcatgcctggctaatttttgttatttttagtagagacagggtttcaccatgttggccaggctgatctcgaactcctgacctcaggtgatcctcccgcctcggcctcccaaagtgctgggattacaggtgagagccactgtgcccagcctagtcctccttctttcttccattacttagacctctagcacttacattctgccttagagtctagctgattgtttatatgtctgctttttccatgcatcaggaagctgcctaggggtgggaaccatgtcttagtcatctctcttccctcaaattcaaccaagatgctccaaatatgctgaagtagactccctgggggcaagcaactgcaattatattagtttgtatcctccacagtactgaagagcttcctatgcacatagtagggattaacaaactttgtaattttaagaagtctaacagaaaatactcaagtatgctttgagaatttctatgccatttctgtcttttgaaatatcattcatgccataccagtggaatgggaaatcctggggcttgcttttaattaacaacttttttctagactaagaggggagaggtgggaggaaaaggaaaaagagtgattcagctgactggacagagccacagatagagtcctgcaagtatcacagccccagactatccagaggggtctcattgtctttgtggcactatgaaacatttttgggacaggctttgtctagcaatcacattcagtggattggccttgctcattgggagccactcaaggctacttagaagagatgtgcatctcaaacactgtctgctcagtccagggccactgacaagtcaactggtctgtgaatcctagggccggcttcagcattcaggaaaacgctttgaacttttaccagggaaggcacacaatttcaagtgaagccaaaagtcatgtgtttgtttctccttctgattagtctgatcatcaactgggactttatcatcatgggaacaaaaatactcagattatctgacaagtatcttagtaaccattttctgatagtaacatgtatatgtggatgatgaatccttagtctctcttgtctttgattacatcctcccaccctccccaggagggtggtggtagggagggctaatgatctctggagaagaaagagataaagcttcccaataccaggctgggaaggaagatttattaggattggcctcctaataaaaaaggaaatagatacagactggctctcagacctccagggagtctcagtatactcgtcatcaacaagataactgaatgctgcctcctctgggatcccacaagctcctcctttccaccwgcttctggcgtctcactgtcgctgcctgtgaaaggtccttctactcttataatctactgaaatgatacttctcttcctcaagaccacttactctggtcacaactaattgctccctccatatgcacctattgccctcagtcctcctttcagcctcagcctcattatgtgtgatgatgccttccttgtacacagatgtctgtgttcctagccccatggggacaccctgtggaagagaaaacacttgcctcccgggagtttctagtttaaaaggggcacacgtgcatacacacaacacacacagaaaaataatagcagtgggataagtactgaaaatctggtggaatactagcaagtaaattacgaaaatttatgtattttatacatatctgggtttttgttgttgttaattagagccattttcaagtagaaaagccatttcacatctgatttagtttgtttgtttgtttgttttgagacagagtttcccctctgttgcccaggctgggatgcagtggcatgatcgcggctcactgcaacctcctcatcccaggttcaagcgatcctcctgcctcagcctcctgagtagctgagattacaggcatgtgccaccacacccggctaatttttgtattttcagtagagacggggtttcaccgtgttggccaggctggtctcgaactcctgacctcaagtgagccacccaccttcgcctaccaaagtgctgggattacagacgttagccactgcgcccggcctcacatctgattttgagggaaagaagaaactatcttcggcttaaaaacggtcaacatgaccctgactcctggaacatgccatagagggaagagtggacaaagcgctaggctattggagtcctttccctaactcactggtggtgacttcctctctgacaaatggaaatcatttgccgcctaagagcctgtcggggaatgaaaggtaataaagatgctggtgaactggctgggcgtggtggctcacgcctgtactcccagcattttgggaggccaaggcgggcagatcacctgaggtcgggagtcccaaaccagcctgaccaacatagggaaatcccgtctctactaaaaatacaaaattagccgggcgtggtggcgcatgcctgtaattccagctactgcctgtaatcccagctactcgggaggctgaggcaggagaatctcttgaacctgggaggtggaggtttcggtgagccgagatcgcgccattgcactccagcctgggcaacaagagcgaaactctgtctcaaaaaaaaaaaaaaaaaaaaaaaaaaaagctggtgaattgttgtttgcaggggaacaggccaagcaaaatgcacagcaacctgcaggaggccaagcaaaatgcacagtgacctacaggaagaaacctgactgggagttcctcagactcacaggaaatcagttgtgggtctgattcctctccctcctcagctctttccagagcctcagcctggaaatctccatctcctccttgtgggagctaggtacaatgcagtgatccacggccaagctgaagtctcgagttaaatccaagacctgagggtactcccaatccctcagtgaagtgctgcgctgggttgccgggcaactaactgctacagctggggcagaaggtgggtgggatgctgagaaaaaaataccagaatcgaggacaagaaaaacagagtgggaggggcttttcaaggatctacgctttagaatttacaccatccttccaaatcgtagctkygtttccgggaactgagttgtgtttaccttggcttccgactatgttggcaacaggtttcctgcaagaaacaggcgcgtctccacaccctcgtccctcctccccaccccctgcctttcaatagccatcttcctggagccggaggcatcccagattaagggagaggtacgggccctttaagcttgacctatggaggcggacggagctaaaactgacgtggaaccggaatgtgagcggtgtcagacacgtggtacaaggaggcattcatcttggaaccgggcaattggcatttccgctctgggtagtacatctttaacataatgttagggaagtatccgttcttggctgcctttctttaattgcgtttccagtactctctcggtgattctactcttgaacataggatgaaatttggaatcacacttctcttccacttccatccccaccctctaatgcccatattaaaaatggcggccgccgccttccgcagtaatggttgttcagcgaacaagatccgggcggaaacagtagataggcgggtgcagcggggcagaacataggttgccttagagaggttccccggtgtcccgacggcggctcaagtcagagttgctgggttttgctcagattggtgtgggaagagcctgcctgtggggagcggccactccatactgctgaggcctcaggactgctgctcagcttgcccgttacctgaagaggcggcggagccggscccctgaccggtcaccatgtgggccttctcggaattgcccatgccgctgctgatcaatttgatcgtctcgctgctgggatttgtggccacagtcaccctcatcccggccttcckgggccacttcattgctgcgcgcctctgtggtcaggacctcaacaaaaccagccgacagcagatgtgagcagcggcacacgggtccgggcagggggcaagggctaaggaaggagtggctagggcaggggcgggaaccggggtgcttgaccacacgtgaagactcagaactaacccaggcagcctggaactcggagaggtgatgagcagaacttactcgcattggggaaaggatgggtagggacccttgggtatatctgggactctggcagtggtgctttcctccctccgcccccctcaccacttaccagaataaaaaaccgggaatgagaagaccactttgggttactgtaacacctgcactagtgagtgaccacgccccctttcctcttccccctcgcccccttgctgctgggccacagcccagaatcccagggagtgatcagcggtgctgttttccttatcatcctcttctgcttcatccctttccccttcctgaactgctttgtgaaggagcagtgtaaggcattcccccaccatgaagtaagtgggttcgtgggggtgattgcctgtggctgggacctgggaggtacctgagagaactggggttatttgggcttgtggggaggggctaagaaattatcagaaaagacaggaattcttaaaaggtggaatgggagcaggcttgagtcatggacctgcccgagcctcccccagtttgtggccctgataggtgccctccttgccatctgctgcatgatcttcctgggctttgcggatgatgtactgaatctgcgctggcgccataagctgctgctacctacagctgcctcactacctctcctcatggtctatttcaccaactttggcaacacgaccattgtggtgcccaagcccttccgcccgatacttggcctgcatctggacttgggtaggtagtcctaccactgctgcccctatggcacctacttcagggaacccttcctggtgctccacattctcctccaagtgttccttttntgtctctgtgtcttcccagatcctttctggtagcccttcatcctatcgtccgtcctcaccacttttctaaaaattcttaaatcctcctcccctaggtggcactacttcttttcctaccatctctccccgcaggaatcctgtactatgtctacatggggctgctggcagtgttctgtaccaatgccatcaatatcctagcaggaattaayggcctagaggctggccagtcactagtcatttctgcttccatcattgtcttcaacctggtagagttggaaggtaggtgggattgggggtggggagagagaagtctgagtgttaaaggtgtggcctgatatatgactttgggaaattcaggggaaaaaagcaatakgcrtagtaattatagaagataagrgaagctacttactttgcaaataacaatgcagatttattaaaagkgrgaaagaaaaatagtagccctgtcatttatagctggattggcactaatagctaggccatgatcttctcccattgaatataaacagtttcacagaaccccaacgttacacaggktcattctgtgaccgtgatggagcaagactaaaactagacccctccctctgtaatcatgtttgagcacaggcaaaaccacaagaacactgagcaacccacaaaatggccaagatcccctctctcggctaacatgagcgactgctgctgctctccaataacaactcagttcctaccacttcttttttttttttttttttttttttttgagacagggtctccctctgtcatgcaggctggagagcagtggcgcgatcttagctcactgcatcctctgactcaaacgatcctcctgccccagcctcccaagtagctggggctacaggcatgtgccaccacacctggcaaatttttgtattttttgtagagacagggtttcaccatgttgcctaggctggtcttgaactcctgggctcaagtgatctgccaggcctcccaaagtgctgggattacactcttgagccactgtgcccagccagttcctaccatttcttaaataaacattaaaatgcttgatcatagaattactcttgctttcttttcttttctttttttttttttttttgagacggagttttgttcttgcccaggctggagtacaatggtgcgatctcggctcaccgcaacctccgcctcccaggttcaagcgattctcctgcctcagcctccctagtagctgggattacaggcatgtgccaccacgcccagctaattttgtatttctagtagagacggggtttctccatgttggtcaggctggtctcgaactcctgacctcaggtgatctgcctgcttcagcctcccaaagtgctgggattacaggcgtgagtcaccgcacccggccatgaattactcctgctttctaacagcacccagtccagagcaaaactactttctttcaccctctcccaaaatacccaaaacaaacgctactacaagcccctcctaacaccctcttactgagacattccgtggttcccaatggtgtgtggtttctgaagtctccctttttacaacaagtcattaaacctagctttgaactatagatgtgtttctgatggtctttggctgatgaacatcaacaagtgtttattaaagctaagtactttttaaacactatcttatttaaatcttgtaatggttttatgtggcagatgttataatcagccctgttttacagatgagaaaacaggcttagagaagttaaatgtgtcatgatcaagatcaaggtcacaaagctaagaagtaaagttggtatccaaacttacatcagaatgggctaaaccaaatttaagatagtaactagtttggaaggctgcacgaaagaggtggaatattgggaattgccttgggtgacataaaaggagtattgagttcttaaaagtgacttgggtgaggtggatgataacagctgtaaacagaacttagacaaaaataggaccaaggtttgcagaggaagtgggtattaacttttccttctttcttccttgcttccaaaggtgattgtcgggatgatcatgtcttttccctctacttcatgatacccttttttttcaccactttgggattgctctaccacaactggtaagtaggcctgtggataaggggacaactacctgaacacatggcaaagatggcccttatcataacccaccttgtggtggtgaagctaaacctgcgcatacctctatggagttttctgcgtcttcagttggtcgtattctgaaatttctctctacccagtagtagttagggatgagtgcgtggaggccccaggaatagatgaattcagggccttggatcctgcagagttgctgcacaactggagtctcctctgagtcagaactagggtcagggctagtccagtgcccatagggtgtgatgtgagagaagggattggtaatgcytcttgccactggctcrgatcctcttcccccacacaggtacccatcacgggtgtttgtgggagataccttctgttactttgctggcatgacctttgccgtggtgggcatcttgggacacttcagcaagaccatgctactattcttcatgccccaggtgttcaacttcctctactcactgcctcagctcctgcatatcatcccctgccctcgccaccgcatacccaggtagccgctttttggcttgaaatggacatcatagccttttcacttgggatatctaatgccagcctatacatttgctgtgcaaagggagtgggcccaaagaagggctatttccatgtgagtagccctttataacttacaaagcacatttatttgcataatctgctacagtggttctgataacagtaagcagcagagccagaaatagatctcaggttgactccacattcaatgctcttcctattagccacagggaggagggttcaaatagtggcccagtcacatgaagctatcttcccccygcagactcaatatcaagacaggcaaactggagatgagctattccaagttcaagaccaagagcctctctttcttgggcacctttattttaaaggtaacagggtaacaaggaggtaaggccctaggctgccatcctgaccttgaggaatggggaacctagtcctacatcagatccaaggggaacttgaaagcattaaatagatccacattcctaaagcataggtattagctgaggttctcttcacctctggtccctccaggtggcagagagcctccagctggtgacagtacaccagagtgagactgaagatggtgaattcactgaatgtaacaacatgaccctcatcaacttgctacttaaagtccttgggcccatacatgagagaaacctcacattgctcctgctgctgctgcaggtgaggatgggaatcgagtttatacctccgtgtctccctttctgcgtgattcttactccagtccatttctccttgcagatcctgggcagtgccrtcaccttctccattcgatatcagctcgttcgactcttctatgatgtctgagtcccttgatcattgtcctttacctcacagtctctaggattcctgactcaggctgacctctctctctggtcccagactgcctccttgcccaggcctctctcactcttcatactcctccagattttgttctcagcattttcctttctctgtgatcattggcatcctgggcgtttcttgccctctrctgactactgattggattttacctatggctttctgcaacttgctactctctccctctccatcccatctttgcagcctcatagggtgggatacagcagctttttttgcagttatccacactcacatttcagagtcctgactctcaaggaaccactggtttttgggatagaacttgggccagggctaggaacacaggctccacggtgacatgtcatttgattgtaaattaagtgytctgattagtaagaactaagcagggggccacatgctctcaatggagacaataaagtgttgtctttttcttattgtttatgtaggtatatttcctatatgggcatttttgggtagattgggaggggtggtgggggtacttcctccaacaggatgcctatctctctgccccatcagaccccgtctaacaagaagtgaacagaactgagaccaaacagaacatattgaataaatatttaaatcctgatactagaggtggcatggagggccacaaaattgaagttatcctgtttcctggcatgggaacaaactttcaaagagtcaccgggtgcagtggctcatgcctgtaatcccagcactttaggaggctgaggcaggaggattgcctgagcccaggaattcaagacagcctgggcaacaaaacgagactccgtctctacaaaaataaaataattagccaagtgtggtggagcacttgtagtaccagctacgagggaggtttagcagggaggattccttgaacccaggagttcgaggctgcagtgagctgagatcacactactgcactccagcctgggtgacagagccagtgacacccggtctattaaaaaaagaaagaaagaaaaaaaagaaaacttttaaggggtctaatttcttcacttttccattctccctttgtcaggtaggagaagggagtagggagtgactggacctggaaaggagggctgcagtagctataatattgacccctttcctttaaaaatcctacgccggcacagatttcccagacgctctctaggtggcctcagactccacccctttggtcttccgcttctggtttccgattgtagtgtttaaatctcgcgcgctttacaaggattggctacatcagcggatagttggcagtctgcgtgctacccctcctcctcgccttttctccccgggcaaaaggttttcaaattcgaccaatcagcgggcgcgctccctcagccgagccgcgacacccaagggttaaccgcaaccaaccggaggcgggtattggagaaaagagccaatcaggagggcgcagaggtgtgtcctgggggcttataaaggcggcctcgcggcgcgcgcgcgacagcagttacactgcggcgggcgtctgttctagtgtttgagccgtcgtgcttcaccggtctacctcgctagcatgtcgggccgcggcaagactggcggcaaggcccgcgccaaggccaagtcgcgctcgtcgcgcgccggcctccagttcccagtgggccgtgtacaccggctgctgcggaagggccactacgccgagcgcgttggcgccggcgcgccagtgtacctggcggcagtgctggagtacctcaccgctgagatcctggagctggcgggcaatgcggcccgcgacaacaagaagacgcgaatcatcccccgccacctgcagctggccatccgcaacgacgaggagctcaacaagctgctgggcggcgtgacgatcgcccagggaggcgtcctgcccaacatccaggccgtgctgctgcccaagaagaccagcgccaccgtggggccgaaggcgccctcgggcggcaagaaggccacccaggcctcccaggagtactaagagggcccgcgccgcggccggccgccaggcctccccatgccaccacaaaggccctttttaagggccaccaccgccctcatggaaagagctgagccgcttcagactgcggggcaagcgggccgcggctcccttcccctcccctcccctcgcccgccttcgccgcccggcctcgagtccccgcccgcccccgctcccgtcccgcaccgcctgccgcgtcggcctcgggccctgccctgtccgccgtccgccctccggtagggttcgggccttccggatgcggcttgggcgctcttcggggacctccgtggcgcggaagacccgagcctgccggggggaggccggcggcgccgcacctgcccgcctcggcgttcgtgactcagccgccccatcccgagtcgctaaggggctgcggggaggccgcagcaccttctggaagacttggccttccgctctgacgcagggccgaggtgggcagtccaggccgagaggccggcggccctgaaggtgagtgaggccctcggcagctgcagccggggtgtctggtacccccccggcgtggtgcttagcccaggactttcagacgcggccgctggccgggaggctttggtgggagagacgcgatcgctgatttcggtctggcgccccttctgcggccgggacccaggcctttcacatcagctctccctccatcttcattcataggtctgcgctggggccgggacgaagcacttggtaacaggcacatcttcctcccgagtgactgcctcctaggaggacatttaggggagggcagaggcctgcagtttggcttcacggctggctatgtggacagcaagagtcgttttcgcggaagccgactggcagccaggcctgtcgggccccccgacgccgccccatttcccttccagcaaactcaactcggcaatccaagcacctagataccagcacaagtcggttaatccctgtctggactgagcctccgttggcttctgaactggaattctgcagctaacccttccacgactagaaccttaggcattggggagttttagatggactaattttattaaaggattgttttttttttaaatggagcatttgttttcattttgcaagagagttgtagaattagtgactttctatactttcctgataataggggtgggaggggccatgcaatataaacaggctctactgttaactgaaggggcaaaccataggaatttaagattgtggctctgtttcttggtgttcctgggagacaatttattctgtgtgaaatgaaaactattgaggcagaagcagaaaggacgtaccaggagaactctgggcaaaagtcccagcctctgaggtaaggatgaaagggctttgtgtttgttcctatcttcccgccaactccacacgcgcacacacaacaccttcagaactggtttattagtaggattggttacattcaaaggctgttgcttggacttctctaaagagatgaagcccccacatactgaggaggcaaggcagtcatcaaggccccaaggtgaggcaaatccctggaaggcttgaaccctgcagttcagtctcccggggtaatcactccccagatagcagtgagaatggggcactgaggcccgggatgtaggcactggacagcagcaacccaggcatctgtgccccacaaaccagttaatgggcatcgttaagctgccgtgcaacatccaggatgtttttggctcctttgctcagcaacaagttggccaggctgatgcccaagttctgggcagccaactggggccctcgtggaatgttacgagcagtgatgcctaccaactgtgggtcatcctcagggccatcttcatgctgtatgagggaaggaggtgggatttggtgagaacaagagattatatgcactcttgtttattaccccctcgccctccagctttggtacctgggcagggacatggatggtagcctgcatggtctcttgtatgctatctgagccgtctagactccagactcctccagtcaggtacagctggggaagaaaacagttgcctcagcacagtctgagaggggactacctagaaacctgggatgcacaggaagaaatgccacagtcctcctttccctggcttcccgcccatttccccccacttacttgcccatccttcatagctgtatgcacggctactggcacactgcagcctccttcctgtaacaagaagttcttgtgagctgcaagggctcttaacaccaccctgtgaccacagacctgaggacatcactgaaaaggcaactgtgggcccagacctggtcctatccatacacaacattcaacaagaatgagttagcactgtatacagagcattcatgtaagaaatcttccctgccacctttcccagctctccaagtccccagccctccacaggtggagcacaggccctaccaggtgcctcaggaaggccctttcagcgatgcagcgaagcagagtctcgggatcgtgcagcacacccaccagatccaagatgtcctggtccttggctcgcacttccacgcccaaggccccctgatggaaaaacatcctaggacatcaggcctgatctttccccaaccaatggcgcaaagcatgggaccacctctatctacttgctccccagcgccttttggaccggtagcatcccaaggtctgcccctccctgagaatgctattctggggaagcagatgcagaaggttgtgagacaagcttcttggttgagaacaaagggaaggcatatgtcaccatgtggcttccctggtcaagtgtacctggcccacagcatacatgcattcctcagggtgcaggatctgtggaggcggaacagggagtcaaaagggtggacacgggggtgtctaaaagcacctggcagtgagatgggagttccctatcatctagaaagcctgggtaggcctaagtgtgagtctggcctcttttttttttttttgtaaattttctccatgaaagcctagagtctggcctctgattcacaatcttcccagcctacggtgttagaggtggggtggtcaagaagtgaagacagatggtccttgacttacaatagggttacatcctgataaacccattgttaagttgaaaacaagctgaaaatgcatttaatacacctagcctaccttacatgtgctcagaacacttaagattagcctattatagttggacaaaatcatctgacaccaagcctgttttacaataaagtgaatatctcatgtaatgaatactgtactgaaagtaaaaaacagaatggctgtatgggtactaagtacagtttctactgaacgtatatcgctttcacacaatcataaagtctaaaaatcctaaattggggatgactgtaaggcagaaaggagatgcagatgagctggggagaggataggggcaggccctacctgccccacccggttgtgccagcccatgcgctgcaggccagctgttgccaggatgatggcactgaactcctgctgctcgtccagcttccgaagccgggtgttgaggtttccccgctgtggagagttgctaaggaccacagtgtcgggcaatctggggcctcgtgcggttccctctgcctgagtctgtctttccctctctagctggctgactttcagtcatcttccagctctcagcttaatgttaacagctaacagttacatcatacttactacatgccagacactgctctaaaagtactttccatatgtcagctcatttcatcttcacaacaaccctgtgaggaaggtagtattattatccccactttacagataaggaaaatgacatagggaggctaaataacttgccaaggttacaagacctctgagaaaccttccctgacaccccagacttctgtgtttagatgttccaactagaagtttccagaaaattcccaacttcacttattggagcacttagcacatactatttttaaatttagttttatgaaatgtactacatattcattgtaaaagtcaagacaatatagtagcatataaaaatggaagtactgaccgggtgcggggctcaagcctgtaatcccagccctttgggaggccgaggctggtggatcacctgaggtcaggagtttgagaccagcctgactaacatggtgaaacccagtctctactaaaaatacaaaaattagccaggtgtggtggcacctgtaatcccaactacttaggaggctgaggcaggaagattgcttgaactcaggaggcagaagttgcagtgagcctagattgcgccactgcactccaacctgggcaacagagcgagactccgtctcagaaaaaaaaaaaaaaaaaaaaggaagtactccctatccctccagaagtagtcactattcagttcagtataactgcattatccctaagtaagacgtaaactctacatatgcaggggaatgtttatcttgctca

SEQ ID NO: 95869 - DNA, 20875 bp, Homo sapiens
  misc_feature (1)...(20875): n = A,T,C or G
acccctccttgtgggagcaggccctcagctacttcgctcgcaaggaggaggactgcaaggagtatgtggcagctgtcctcaagcatatcgagaacaagaacctcatgccacctcttctaggtacttgggaagacagatgggtgggtgacaagctgctgacagctgggctctgtggcaggggcccttcacctttatccagagagtgccacacgtggttgattgtcttgtttcctcttggaccccaatctcagtggtgcagaccctggcccacaactccacagccacactctccgtcatcagggactacctggtccaaaaactacagaaacagagccagcagattgcacaggatgagctgcgggtgcggcggtaccgagaggagaccacccgtatccgccaggagatccaagagctcaaggccaggtacccggggcatggatatgtggaggagtccaggggataacttgcccttcacagggtattcattactaagtactttccgtagaggatactatggagtgcttttgagcattttgattcttcaagttgtgttttaattgaggaattccaaaaaatggtttattacatagatcattatttattgggctttggatgatattattttgtagcaggtactttttgttctttatatgcctgtattctaccacttctaaacacatccgtattgtggttggaagccgttctggtgtttttcttttttgagacaggatcttgtcactgaggctggagtggaggggtgtgatcacggctcactgcagctttgatctcctgggctcaagtgattctcccgcctcagcctcccaagtagctgggattacaggcgtgtgccaccaagcccagctaatttttggatttttagtagagatggggtttataatgttggccaggctggtctcgaactcctggcctcaagtgatcctccggccttgacctcccaaagtgctgggatgagccacggtgcccggccataatcccaactctgaaatcttacctgcccttaacattctgtaaaatatttattagagaacaacagtttcttcattctacaaatattgagcctctgtggtgtcccagacactattctgaacagcacaggcaaaaagccttcatggagctttatgttgtagaagagacagacagcaaacatgttaaataggcaaactttttttttttcttttgagatagagtctcactctgtcacccaggctagagtgcagtggcgcgatctcagctcacagcaacctttacctcctgggttcaagcgattctcctgcctcagcctcctgagtagatggaattacaggcgcctgccaccatgcctggctaatttttgtatttttgtagagacagggtttcactatgttggccaggctggtcttgaactcctgacttcaggggatctgcctgccttggcctcccaaagtgctgggattacatgcgtgagccactgcacccggccaaataggcaaattttttttttcttttttgagacgaagtctcgctcttgtcccccacgctggagtgtgatggcgcaatctcggctcactgcaacctctgcctcctgggttcaagcgattctcctgccttggccccctgagtacctgggattacaggtgcctgccatcatgcctggctaatctttatatttttagtagagactgggtttcaccatattggccaggctggtctagaactcctgacgtcaggtgatccacctgcctcggcctcccaaagtgctgggattacaggtgtgagccactgtgcccagccaaatagacaaagttttgtagtatgttaggtggtgataagttctgagtggcaaatgaattgagcaaggggagtgggagaagtgtgttaacaagtttagagaaggtggcccaggaaaggcctcagtgaaagggtcacatctgagtacagacctgaaagttaatttagtggcagttgtgaaaatggagacagaggaaacaatccccaggctgagttggccttgttgggagcatgctgagactcactgcaggtccagggctgttgtaatcatttgactcccttaaggcgataagaagagcagggcagggccttcaggggccttaccagggaccttgccctgtgcacttcagctgccttctttctcatccttgactcctggccttgccctcacttttgccactcacttctggtctttcttccctgtagtcctaagattttccaaaagaccaagtgcagcatctgtaacagtgccttggagttgccctcagtccacttcctgtgtggccactccttccaccaacackgctttgagagttactcggaaagtgatgctgactgccccacctgcctccctgaaaaccggaaggtcatggatatgatccgggcccaggaacagaaacgagatctccatgatcaattccagcatcaggtggggatgagtgggctagatgggccaggggattcccactagtgtcacagagtcactggagggcttgtttccttatcacctcctcatttaagaaacaagcactttgattctgattcgtattccttccctcctcttctcctgcagctcargtgctccaatgacagcttttctgtgattgctgactactttggcagaggtgttttcaacaaattgactctgctgaccgaccctcccacagccagactgacctccagcctggaggctgggctgcaaygcgacctactcatgcactccaggaggggcacttaagcagcctggaggaagatgtgggcaacagtggaggaccaagagaacagacacaatgggacctgggcgggcgttacacagaaggctggctgacatgcccagggctccactctcatctaatgtcacagccctcagaactaaagcggactttctttccctgccttcttatttagtcagcttgccatccctcctcttcactagcagtgtagatcattccagatcagtgggggagggcacctcagcaacctctgagtgtggacaatagctgctttcttctctatccaagagcaccaggctgtgcttgggtccttgctctcagagtctataaataaaagaatataatgatttgggagcttaaggatttttttctggggacttcctggtgattcttaactgcatgatggacttccttccctctgctctcctggcgttccacttccctcctacggttttcttggagaccatgttgactcagtctcgttctggtaatgggtggggcctgtggcatcgcatacagttcaatttactgaagaacctctgcaaaagacctaatgactgagctccaggagcagcctggaccaagacccccaaaacagctcttactctttcctcttcctggtctctatggctgtagtttgggcaaaatattcaagcaggaggcagattctggtagggagctttgggcttaacctaccttaaataatgggtaggttggtgtcttgctatacttaataccagatgataaacgggataaaaggtcctttctggaaacacctttccctctctgaaattgtcagctaaagtttatgttgctaggtgtccccgtgtaatttgggtggtgctgcctgtctgaaaattgctcctatgttgtygttttccccacagcctcacctaatttcatcttctacgttgtttaattggaggacgtaagtttgacactgtggtttaggtagtatttaggattgccatgggctgggcgcggtggttcatgcctgtaatcccaacactttgcggggctgaggtgagaggatcgcttgagtccaggagttcaagaccagccacccaggcaacatagtgagaccccgtctgtgcaagaaataaaaataaactagcccagcctggtggcgcttgcctgtggtcccagctactcaggaggctgaggtgggaggattgcttgagcccaggaagttgaggctgcagtgagccttgatcacaccactgcactccagcctgggtgacagacaccctgtctcaaaaagtaaaaaattaaaaaacagtggcagtattgtagctgctatgctatgagtagactttgcatctactgagctgggtttgaatcctagttgtgctgtttgacttaaggcacatcttaccttctcaacatgttttttttttttttttgagatgtatttttttcagtgggtttttggggaacagttggtatttggctatgtgaataagttctttagtagtgatttctgagatttggtgcccatcacccaagcagtgtacactgtacccaatgtgtagtctcttatccctcaccctgctcccaccctttccccctcaacctgtgtcttcatctgtacgttagggattataacacctatgctgtgtggctattatgaaagcctaaggatcaaataggtgttcagttctttgtacagtgctgagcacatgggtgattttttttttcttcttaagacagggtctcaccgggcgcggtggctcatgcctgtattcccagcactctgggaggctgaggtgggcggatcacctgaggtcaggagttcaagaccagcctgaccaacatggtgaaactccgtctctactaaaaatacaaaaaccagctgggtgtggtgggaggtgcctgtaatcctagctactcaggagggtgaggcaggagaattgcttgaacccgggaggtggaggttgcggtgagctgagattgcaccattgcactccagcctgggcaacaagagtgaaactccatctcaaaaaaaaaaaaaaaaaaaaatgggcgtctcactctgtcatccaggctagagtgcagtggcaccaccacagctcacagctacctcgacctcctgggctcaagcgatcctcacacctcagcctcctgaatagctgggactacaggtgtgtgccgccacacctggctatttttgtattttttgtggagatgaggttttcaccatgttgcccagggtggtctcaaactcctgggctcaagcaatcctcctgccttggcttcctaaagtgctgggaatataggtgtgagccactgcacctagctgggtgattattaataatcatgattgttaattatgttcatgattacaggcgcggtggctcacgcctgtactcccagcactttgggaggccgaggtgggcgaatcacctgaggtcaggagttcaagacctgcctgactaacatggagaaacctcatctctaccaaaaatacaaaattagccgggtgtggtggtgcgtgcctgtaatcccagctactcggggggctgaggcaggagaattgcttgaacccgggaggcggaggttgcagtgagctgagatcgtgccattgcattccagcctgggcaacaagagcgaaactccgtctcaaaaaaaaaaaaaaaattatgttcatgggaaagcacttttcctaacaagcccttttctcactacatgtagcgtttgtgctcccacttcagttacttgtctttaggcatgacctttaatctctctgaaccagtttcctcattttaagaattgaaatgctggctgggccagtggctcacgcctgtaatcccagcactttgggaggccaaggcgagatgactgcttgagtccaggagttcgagactagcctgggcaacatagtgaggccacctccccgctgtctctataaaaaaatctagaaattagtcccacgtggtgatgtgcgcctgtagtcccagctgcttgggaggctgaggtggggggatcgctgaagccgggaggtcaaggctgcagtgacccgtggtcatgccgctgcactctagtctggggacacagtgagaccccgtatcaaaaagaaaaatgctgcctatttcaaggttgtagcaaagctaagtttgaacagagcaaaggaagcgccatagaagctgcactacttgctcatgtcacagctggggaatggggaggtcgaatggggaggtccactgtcgcaatgttccaattcccgcccagagggagggacctccccttcgagggagggcgccggaagtgacgcgaggctctgcggagaccaggagtcagactgtaggacgacctcgggtcccacgtgtccccggtactcgccggccggagccyccggcttcccggggccgggggaccttagcggcacccacacacagcctactttccaagcggagccatgtctggtaacggcaatgcggctgcaacggcggtgagtgctgagccggtgaccagcacactttgggcttctggacgagccgtgcagcgattggccccaggttgccatcctcagtcgtctattggtcagaacggctatcttttttttttttttttttttttttttggtccgagtagcttttaaagggccagtagctcggttgccctccggaaggaatggggaaatcagagagcggtgatactgggttaaragtggaaggattgtttggaacggaactccggtccctgcgggcatctgggtgggattcccatcaggcctgggatgcacggctctagatttagtgacccagaccaagaacgttcgtctacacagacggggtcctttcattcgaggctgggctgaggcggatgcagatacggcccctttgggaagacacgttccacttttgattcataggagagagtatcagccaagcctccgaactgcacacaaacgtcttagaagtgcgccttctttttgtgttatagtggtctcccagccacagccaacgctccaagtccccagctgtgacacacctactgaattactaccgtgggtgggaggccgccgtgggcctttccattacgagcctgcttgccgagccctgggcttgtgcacagacaaactgcagagctggtggaggccactgccaggccgagataagaaagagatggggagctgctaatctccccctgtccagcctgttggtgagggctgggatctttgctcttgcagtcattccagagccctggactaggagtaggaagatctgaattgtggccccaactctctttcggttattagctctgtgaccctaggcaagtcacctcatcccttgatgccacccgttgcttctgtaacatggtcccaaaggtgcctgtcttgtccacctgataggatttttgagacgacaacaatatgcaaaagcaatagcttcaacatagaagtgctcagtgttttattttttaatgaaacggtttgacttggatatgctgtgcacattcaatgaacttaaggaattgtttgaacctagtagttctgggaccttagagtcctttctgtgggctccctgtggcccagawttttggtggccacgtttaatatcaagcctagcctaatttgcaaagggtctcccagggttaatttattggagtgatcacatggagtagaccagagtctgagggcagaaagctgtcacctgcttcggcaatagaggccccagatgtctgggtgcaaaagaactccatagcaccccgaccaacatggtgaaaccccgtctctactaaaaatataaaaattaggccgggcacagtggctcatgcctgtaatcctagcactttgggaggccgaggcaggtggattgcctgagctcaggagttcgagaccagcctagggaacacagtgaaaccccgtttctactaaaaatacaaaaaattagccgacgtggtggcatgcgcctgyagtcccagctacttgggaggctaagacaggagaatcgcttgaacctgggaggtggaggttgcactgagccgagaccgcgccattgcactccagcctgggtgacagagcgcaactccccctcaaaaaaagaaaaaaaaatatatatatatatatatatatatacacacatattttagctgggcatggtggtgtgcgtctgtagtagtcccagctacttgggaggctgagtcaggagaatcgcttgaacctggaaggcagtggttgtagttagctgagaacatgccactgcactccagcctgggcaacagagggagactctgtctcaaaaaaaaaaaaaaaaggaactacataggatgaacatcccagatcagggaatgttgactgtcgacagtatcagtatctacagtggctactgtctgatgtagaaagaaatgggatcaggctaggcgtggtggctcacgcctgtaatcccagcactttgggaggctggggcaggaggatcacaagttcgagaccagcctggccaacacagtgaaaccccgtctctactaaaaatgtgaaaattagctgggcatggtggaacatgcctgtagttccagcttgaacccaggggtggaggttgtagtgagcctagatcacgccactgcactccagcctgagcaaaacagtgagactctgtctaaaaaaaaaaaaaaaaaaagagagaaatgggacctccgtcttagactgaagaattcagttctacgtgcttagcagtgaatacttttgtccaaggtactctggcaggaggaagaggcgtgtcctcttgagttcttgacttgggctctggcctgttaatatttccatgttggtgaaaccagaggcagcactctaggtgmacgaactttaggcagcgcagcctcctagtcttatggaacatctgaggcagaagaaacctgagtccaaccttttcattttatagatgaacaaacagatcctgrtgggacagtgtacccaaggtcacccagccaagaggctgagcaggactgtacgtcagatccgtttacctcagtccttaatgcatgcagtccagccagattaagggacccttaatactgtcagctttccccactgtgggatcttcatcctcttgacttcttttgtagccagacatctgggcctcttgctggagaaggtggcagcttgctgctcttagactctagtctactccatgtggcatctggatggcactgaaattttctcaagtgccttgtctgttgtagataatgaatctatcctccagtgactcagcacaggttccccagtgtggtcctggctgccctgcccctgccagctgcaggccccacccttcctgtggccaggctgatgggccttatctctttacccacctggctgtgcacagcactcccactgacaactgccttggtcaaggtgggcttcagggctcagtgtcctggttactgcagcggcagcaacagcaggtcctactatcgcctccctctagtctctgcttctctggatccctgaggagggcagaaggtactgaggaaggttaaagggaccagccttggagtatttccccactctgagactcagctggccacaggccaggttctgaanttcctttcttccaagccagtgattctggttyttggacaaggtgttgaggaacactagaaacagaggggactgtgacctggggactttttctgcaggaagaaaacagcccaaagatgagagtgattcgcgtgggtacccrcaagarccaggtgggtgcaggagccggggtggaggaggtttgtcagaacagttatgatgctcacagcatcacaaattgggggactcagagggttagttcctagtatgaaggagatggggtggctgggcgttaagttccccgggaaatggcagattacattctatggcaagatcatccctaggctgggaaaattgttggagtgcagagggctcccaagccccttctcatgcccagatggaaattccagtcccttcaggatctgcctaacctgygacagtctaaagagtctgagccgtggctgggaagggcaggactaatccaartctctacccgcagcttvctcgcatahmgayggacagtgtggtggcaacattgaaagcctcgtaccctggcctgyagtttgaaatcagtgagttttctggaaaggagtggaagctaatgggaagcccagtaccccgagaggagagaacacaacatttctggctttgcctatagctaaagcccgtcccgctgccccgagattccttctgggctgctcccagttctgaaggtgctttcctctgaatacctccagctctgactacctggattagcctggcatttaacatcttgagctttgggtctttttatgagtgtttctggtcttcctgctcgattgtatatactcagagggcaggaaccagggattatgtgcctctgtccccatcatgaatcgtagcacagngctaggctcagtaaatgctgatcaataatgagcacctgattgattgactctctcctcagttkctatgtccaccacaggggacaagattcttgatactgcactctctaaggtaacaacatcttcctccccagttcttgtccccactcttctttccttccctgaagggattcactcaggctctttctgtccggcagattggagagaaaagcctgtttaccaaggagcttgaacatgccckggwgaagaatgagtaagtaaagataggagagtgtggtgccctcccagtctcttgctgggaccctagtatgctaggtctcttgctgggacccggggtgtcagataggctgctgggcttaaaccctcagagaggctgaaggcagctcataggtgggttttttcaggcttcagaaaaggagagtgtctggttctgagccatctggctgcctggactgcaagaatggctgggggagggagggtaggagggagagtaggagggagagtgagaggagagcagttttcatgctcctgagatcttgagaaggtgtgcttcctgaactgccctaggctccaccactgaagtagaggcaggggtgggtggagaaggggtgaaggctggctgctcataccctttctctttgcccccctctcccatctctatagagkggaccygkttgttcactccttgaaggacctgcccactgtgcttcctcctggcttcaccatcrgagccayctgmaagtaagagtcttgcaagtaaggggcttgggcaggggtaggcatcatgtgaacctttgcctttccctttggggcctgaccctctgcttcagggttatctcctctgccctgaggagtgttgactggtggcagaaaactcaagaaataccagtgagttggcaatcgagagagaatagaggtgatctgaacttaaatctcttccctcattctgtgcccttccctcctcccccaggyrggaaaaccytcatgatgctgttgtctttcacccaaaatttgttgggaagaccctagaaaccctgccagagaagaggtaagtggggcctggataggcagcttggtgggatgtgcccagaagatgcagggatgggaggaggaggaaaggaacagtgactgcctagtgttaaaatctcattgtaacttctctctgggcagtgtggtgggaaccagctccctgcgaagagcagcccasctgcagagaaagttcccgcatctggagttcaggagtattgtatccttttaraagagtgacggatccttttggaagagtgacggagacagcagccaaggaaaaagacaaggtctagagggctctgggagtccggasagtggaaggggcttccagcaagcagcccgtggggtcagtggcctgtctgtctttccatgcactcatccgtccactcatttacagtctaatgttttcttagccccagacaagtgttcagagtgcaaggcattggggataatggtgagcaagataaacattyccctgcatatgtagagtttacgtcttacttagggataatgcagttatactgaactgaatagtgactacttctggagggatagggagtacttccttttttttttttttttttttctgagacggagtctcgctctgttgcccaggttggagtgcagtggcgcaatctaggctcactgcaacttctgcctcctgagttcaagcaatcttcctgcctcagcctcctaagtagttgggattacaggtgccaccacacctggctaatttttgtatttttagtagagactgggtttcaccatgttagtcaggctggtctcaaactcctgacctcaggtgatccaccagcctcggcctcccaargggctgggattacaggcttgagccccgcacccggtcagtacttccatttttatatgctactatattgtcttgacttttacaatgaatatgtagtacatttcataaaactaaatttaaaaatagtatgtgctaagtgctccaataagtgaagttgggaattttctggaaacttctagttggaacatctaaacacagaagtctggggtgtcagggaaggtttctcagaggtcttgtaaccttggcaagttatttagcctccctatgtcattttccttatctgtaaagtggggataataatactaccttcctcacagggttgttgtgaagatgaaatgagctgacatatggaaagtacttttagagcagtgtctggcatgtagtaagtatgatgtaactgttagctgttaacattaagctgagagctggaagatgactgaaagtcagccagctagagagggaaagacagactcaggcagagggaaccgcacgaggccccagattgcccgacactgtggtccttagcaactctccacagyrgggaaacctcaacaccyrgcttcggaagmtggacgagcagyaggagttcagtgccatcatcctrgcaacagctggcctgcagygcatgggctggcacaaccgggtkgggcaggtagggcctgcccctatcctctccccagctcatctgcatctcctttctgccttacagtcatccccaatttaggatttttagactttatgattgtgtgaaagcgatatacgttcagtagaaactgtacttagtaccyatacagccattctgttttttactttcagtacagtattcattacatgagatattcactttattgtaaaacaggcttggtgtcagatgattttgtccaactataataggctaatcttaagtgttctgagcacatgtaaggtaggctaggtgtattaaatgcattttcagcttgttttcaacttaacaatgggtttatcaggatgtaaccctattgtaagtcaaggaccatctgtcttcacttcttgaccaccccacctctaacaccgtaggctgggaagattgtgaatcagaggccagactctaggctttcatggagaaaatttacaaaaaaaaaaaaaagaggccagactcacacttaggcctacccaggctttctagatgatagggaactcccatctcactgccaggtgcttttagacacccccgtgtccrcccttttgactmcctgttccgcctccacagatcctgcaccctgaggaatgcatgtatgctgtgggccaggtacacttgaccagggaagccacatggtgacatatgccttccctttgttctcaaccaagaagcttgtctcacaaccttctgcatctgcttccccagaatagcattctcagggaggggcagaccttgggatgctaccggtccaaaaggcgctggggagcaagtagatagaggtggtcccatgctttgcgccattggttggggaaagatcaggcctgatgtcctaggatgtttttccatcagggggccttgggcgtggaagtgcgagccaaggaccaggacatcttggatctggtgggtgtgckgcacgatcccgagactctgcttcgctgcatcgctgaaaggrycttcctgagghacctggtagggcctgtgctccacctgtggagggctggggacttggagagctgggaaaggtggyagggaagatttcttacatgaatgctctgtatacagtgctaactcattcttgttgaatgttgtgtatggataggaccaggtctgggcccacagttgccttttcagtgatgtcctcaggtctgtggtcacagggtggtgttaagagcccttgcagctcacaagaacttcttgttacaggaaggagrctgcagtgtgccagtagccgtgcatacagctatgaaggatrggyaagtaagtggggggaaatgggcgggaagccagggaaaggaggactgtggcatttcttcctgtgcatcccaggtttctaggtagtcccctctcagactgtgctgaggcaactgttttcttccccagctgtaccygactrgaggagtctggagtctagacggctcagatagcatacaagagaccatgcaggctaccatccatgtccctgcccaggtaccaaagctggagggcragggggtaataaacaagagtgcatataatctcttgttctcaccaaatcccacctccttccctcatacagcatgaagatggccctgaggatgacccacagttggtaggcatcactgctcgtaacattccaygagggccccagttggctgcccagaacttgrrcatcagcctggccaacttgttgcygagcaaaggagccaaaaacatcctggatgttgcacggcagcttaacgatgcccattaactggtttgtggggcacagatgcctgggttgctgctgtccagtgcctacatcccgggcctcagtgccccattctcactgctatytggggagtgattaccccgggagactgaactgcagggttcaagccttccagggatttgcctcaccttggggccttgatgactgccttgcctcctcagtatgtgggggcttcatctctttagagaagtccaagcaacagcctttgaatgtaaccaatcctactaataaaccagttctgaaggtgttgtgtgtgcgcgtgtggagttggcgggaagataggaacaaacacaaagccctttcatccttacctcagagrctgggacttttgcccagagttctcctggtacgtcctttctgcttctgcctcaatagttttcatttcacacagaataaattgtctcccaggaacaccaagaaacagagccacaatcttaaattcctatggtttgccccttcagttaacagtagagcctgtttatattgcatggcccctcccacccctattatcaggaaagtatagaaagtcactaattctacaactctcttgcaaaatgaaaacaaatgctccatttaaaaaaaaaacaatcctttaataaaattagtccatctaaaactccccaatgcctaaggttctagtcgtggaagggttagctgcagaattccagttcagaagccaacggaggctcagtccagacagggattaaccgacttgtgctggtatctaggtgcttggattgccgagttgagtttgctggaagggaaatggggcggcgtcggggggcccgacaggcctggctgccagtcggcttccgcgaaaacgactcttgctgtccacatagccagccgtgaagccaaactgcaggcctctgccctcccctaaatgtcctcctaggaggcagtcactcgggaggaagatgtgcctgttaccaagtgcttcgtcccggccccagcgcagacctatgaatgaagatggagggagagctgatgtgaaaggcctgggtcccggccgcagaaggggcgccagaccgaaatcrgcgatcgcgtctctcccaccaaagcctcccggccagcggccgcgtctgaaagtcctgggctaagcaccacgccgggggggtaccagacaccccggctgcagctgccgagggcctcactcaccttcagggccgccggcctctcggcctggactgcccacctcggccctgcgtcagagcggaaggccaagtcttccagaaggtgctgcggcctccccgcagccccttagcgactcgggatggggcggctgagtcacgaacgccgaggcgggcaggtgcggcgccgccggccwccccccggcaggctcgggtcytccgcgccacggaggtccccgaagagcgcccaagccgcatccggaaggcccgaaccctaccggagggcggacggcggacagggcagggcccgaggccgacgcggcaggcggtgcgggacrggagcgggggcgggcggggactcgaggccgggcggcgaaggcgggcgaggggaggggaggggaagggagccgcggcccgcttgccccgcagtctgaagcggctcagctctttccatgagggcggtggtggcccttaaaaagggcctttgtggtggcatggggaggcctggcggccggccgcggcgcgggccctcttagtactcctgggargcctgggtggccttcttgccgcccgagggcgccttcggccccacggtggcgctggtcttcttgggcagcagcacggcctggatgttgggcaggacgcctccctgggcgatcgtcacgccgcccagcagcttgttgagctcctcgtcgttgcggatggccagctgcaggtggcgggggatgattcgcgtcttcttgttgtcgcgggccgcattgcccgccagctccaggatctcagcggtgaggtactccagcactgccgccaggtacactggcgcgccggcgccaacgcgctcggsgtagtggcccttccgcagcagccggtgtacacggcccactgggaactggaggccggcgcgcgacgagcgcgacttggccttggcgcgggccttgccgccagtcttgccgcggcccgacatgctagcgaggtagaccgrtgaagcacgacggctcaaacactagaacagacgcccgccgcagtgtaactgctgtcgcgcgcgcgccgcgaggccgcctttataagcccccaggacacacctctgcgccctcctgattggctcttttckccaatacccgcctccggttggttgcggttaacccttgggtgtcgcggctcggctgagggagcgcgcccgctgattggtcgaatttgaaaaccttttgcccggggagaaaaggcgaggaggaggggtagcacgcagactgccaactatccgctgatgtagccaatccttgtaaagcgcgcgagatttaaacactacaatcggaaaccagaagcggaagaccaaaggggtggagtctgaggccacctagagagcgtctgggaaatctgtgccggcgtaggatttttaaaggaaaggggtcaatattatagctactgcagccctcctttccaggtccagtcactccctactcccttctcctacctgacaaagggagaatggaaaagtgaagaaattagaccccttaaaagttttcttttttttctttctttctttttttaatagaccgggtgtcactggctctgtcacccaggctggagtgcagtagtgtgatctcagctcactgcagcctcgaactcctgggttcaaggaatcctccctgctaaacctccctcgtagctggtactacaagtgctccaccacacttggctaattattttatttttgtagagacggagtctcgttttgttgcccaggctgtcttgaattcctgggctcaggcaatcctcctgcctcagcctcctaaagtgctgggattacaggcatgagccactgcacccggtgactctttgaaagtttgttcccatgccaggaaacaggataacttcaattttgtggccctccatgccacctctagtatcaggatttaaatatttattcaatatgttctgtttggtctcagttctgttcacttcttgttagacggggtctgatggggcagagagataggcatcctgttggaggaagtacccccaccacccctcccaatctacccaaaaatgcccatataggaaatatacctacataaacaataagaaaaagacaacactttattgtctccattgagagcatgtggccccctgcttagttcttactaatcagaacacttaatttacaatcaaatgacatgtcaccgtggagcctgtgttcctagccctggcccaagttctatcccaaaaaccagtggttccttgagagtcaggactctgaaatgtgagtgtggataactgcaaaaaaagctgctgtatcccaccctatgaggctgcaaagatgggatggagagggagagagtagcaagttgcagaaagccataggtaaaatccaatcagtagtcagcagagggcaagaaacgcccaggatgccaatgatcacagagaaaggaaaatgctgagaacaaaatctggaggagtatgaagagtgagagaggcctgggcaaggaggcagtctgggaccagagagagaggtcagcctgagtcaggaatcctagagactgtgaggtaaaggacaatgatcaagggactcagacatcatagaagagtcgaacgagctgatatcgaatggagaaggtgayggcactgcccaggatctgcaaggagaaatggactggagtaagaatcacgcagaaagggagacacggaggtataaactcgattcccatcctcacctgcagcagcagcaggagcaatgtgaggtttctctcatgtatgggcccaaggactttaagtagcaagttgatgagggtcatgttgttacattcagtgaattcaccatcttcagtctcactctggtgtactgtcaccagctggaggctctctgccacctggagggaccagaggtgaagagaacctcagctaatacctatgctttaggaatgtggatctatttaatgctttcaagttccccttggatctgatgtaggactaggttccccattcctcaaggtcaggatggcagcctagggccttacctccttgttaccctgttacctttaaaataaaggtgcccaagaaagagaggctcttggtcttgaacttggaatagctcatctccagtttgcctgtcttgatattgagtctgcrgggggaagatagcttcatgtgactgggccactatttgaaccctcctccctgtggctaataggaagagcattgaatgtggagtcaacctgagatctatttctggctctgctgcttactgttatcagaaccactgtagcagattatgcaaataaatgtgctttgtaagttataaagggctactcacatggaaatagcccttctttgggcccactccctttgcacagcaaatgtataggctggcattagatatcccaagtgaaaaggctatgatgtccatttcaagccaaaaagcggctacctgggtatgcggtggcgagggcaggggatgatatgcaggagctgaggcagtgagtagaggaagttgaacacctggggcatgaagaatagtagcatggtcttgctgaagtgtcccaagatgcccaccacggcaaaggtcatgccagcaaagtaacagaaggtatctcccacaaacacccgtgatgggtacctgtgtgggggaagaggatcygagccagtggcaagargcattaccaatcccttctctcacatcacaccctatgggcactggactagccctgaccctagttctgactcagaggagactccagttgtgcagcaactctgcaggatccaaggccctgaattcatctattcctggggcctccacgcactcatccctaactactactgggtagagagaaatttcagaatacgaccaactgaagacgcagaaaactccatagaggtatgcgcaggtttagcttcaccaccacaaggtgggttatgataagggccatctttgccatgtgttcaggtagttgtccccttatccacaggcctacttaccagttgtggtagagcaatcccaaagtggtgaaaaaaaagggtatcatgaagtagagggaaaagacatgatcatcccgacaatcacctttggaagcaaggaagaaagaaggaaaagttaatacccacttcctctgcaaaccttggtcctatttttgtctaagttctgtttacagctgttatcatccacctcacccaagtcacttttaagaactcaatactccttttatgtcacccaaggcaattcccaatattccacctctttcgtgcagccttccaaactagttactatcttaaatttggtttagcccattctgatgtaagtttggataccaactttacttcttagctttgtgaccttgatcttgatcatgacacatttaacttctctaagcctgttttctcatctgtaaaacagggctgattataacatctgccacataaaaccattacaagatttaaataagatagtgtttaaaaagtacttagctttaataaacacttgttgatgttcatcagccaaagaccatcagaaacacatctatagttcaaagctaggtttaatgacttgttgtaaaaagggagacttcagaaaccacacaccattgggaaccacggaatgtctcagtaagagggtgttaggaggggcttgtagtagcgtttgttttgggtattttgggagagggtgaaagaaagtagttttgctctggactgggtgctgttagaaagcaggagtaattcatggccgggtgcggtgactcacgcctgtaatcccagcactttgggaggctgaagcaggcagatcacctgaggtcaggagttcgagaccagcctgaccaacatggagaaaccccgtctctactagaaatacaaaattagctgggcgtggtggcacatgcctgtaatcccagctactagggaggctgaggcaggagaatcgcttgaacctgggaggcggaggttgcggtgagccgagatcgcaccattgtactccagcctgggcaagaacaaaactccgtctcaaaaaaaaaaaaaaaaagaaaagaaaagaaagcaagagtaattctatgatcaagcattttaatgtttatttaagaaatggtaggaactggctgggcacagtggctcaagagtgtaatcccagcactttgggaggcctggcagatcacttgagcccaggagttcaagaccagcctaggcaacatggtgaaaccctgtctctacaaaaaatacaaaaatttgccaggtgtggtggcacatgcctgtagccccagctacttgggaggctggggcaggaggatcgtttgagtcagaggatgcagtgagctaagatcgcgccactgctctccagcctgcatg

SEQ ID NO: 95870 - DNA, 23289 bp, Homo sapiens
caggctggagtgcaatggcacagtctcggctcactgcaacctccacctcccgggttcaagcaattctcctgcctcagcctcccaagtagctgagattacaaaccccgtctcttaaaaaaggaaaaaatcacatggcagagtagcattttaaaataaagtcacgaggctgggcgcggtggctcacgcctgtaatctcagcactttgggatgctgaggcaggcgaatcacccgaggtcaggagtctgagaccagcctgacctacgttgagaaaccccgtctctactgaaaatacaaaattacccgggcctggtggcgcatgcctgtaatcccagctgctcaggaggctgaggcaggagaatcgcttgaacccaggaggtggaggttgcggtgagccgagatcacgccattgcactccagcctggacaacaaaagcaaaactccgtcttaaaaaataaataaataaataacattaaactacgtcactcagcctgtgaacaatggctcacgcttataacccagcaatttgggaggccgcagcaggtggatcacttgaggtcacgagttcgagaccagcccggccaacatggtaaaaccgcatttctactaaaaatacaaaattagctgggtgtggtgatgggcgcctgtaatcccagctactcatgaggcaggagaatcgcttgaacccaggaggcggaagttgcagtgagctgaaattgtgtcactgcactccagcctgggtgacagagcaagactccgtccaaaaaaaaaaaaaaaaaaaaagggaccatgttctagtgtaggggtaagtggattgttttggccccaaccccaagaggatcaagggagaccactgcagctgcccgagaaattcttgccctctgacaagaaacaccctatccagtctggggaatttgccagtccaacccctccccttggctcaagattctgggaaatcctaaatagtgtttaccattggccttttatcagctccagtataaatgcatctggccagacttgctttacaactatgcataatggatagttgggccaggcttggtggctcatgcctagtgctttgggaggccgaggtgggaggatcacttcagcccaagagttggaggccagcctaggcaacatggtgagacaccatctctacaaaaaaaaattttattttctgttttttttttgagacggagtgtggcgctgtcacccaggctggagcaacagagccagactttgtctcaaataaataaataaataaataaaacctgcaaaaaaaattttttaaatgccatttttctttctttctttctttctttttttttttgaggcagagtcttgctgtgtcacccaggctggagtgcagtggcgtgatctcggctcactgcaagctctgcctcccgggttcacgccatcctcctgcctcagcctcctgagtagctgggactacaggcgcccgccaccatgcccggctaattttttgtatttttagtagagatggggtttcactgtgttagccaggatggtcttgatctcctgtcctcgtgatccgaccacctcggcctcccaaagtgctgggattacaagcgtaagccaccgcgccyggccatttttctttttaatcaatcctgccacttgaagattatatggtaagggaaatctgcagtctatacacaatactgagttgctccaagcccttgaggattgtgagggacccagtgttctaattcttgctagagtgtctacctccatgttaccagaggcgagtctgaccgggtactgacatgtgatataccattaagtgtgcagtgggttcttttagcctttcccaaatgtctttccacatggcagcgccccacagcattttctttttcttcttttttctttttcttttttttttttttcttttttttcctgggcaacagagtctcactctgttgcccgggctagagtgcagtggcgtgatctcggctcactgcaagctctgcctcctgggttcaagcgattccagtgcctcagcctcccaagtagctgggattacaggtgcacaccaccacgcccagctaatttttgtatttttagtagagatggggtttcaccctgttggccaggctggtctcaaactcttgacctcaggtgatccgcccgcctcggcctcccaaagtgctgggattacaggcgtgagccactacgcccgccctcttttttcttttttgagacagagtctcactctgttgcccaggctggagtacagaggtgccatcatagcttactgcagcctcaaccttcccagctcaagcgatcctcccgcttcagcctccctagtagctgggaatacagatgcacaccaccacacctggctaattttttgcaggttggtctcgaactcttgggctcaagagatctgcccgccacagtctcccaaagtgctgggattacaggcatgtgccaccgtgcccggcatattttcttttcagtgtttacctttttgcctcctctgaggtgctggagtgcagcaataagaaagtaataattttaggccgggcgccagtggctcacgcctgtaatcccagcactttgggaggccgaggagggcggatcacgaggtcaggagatcaagaccatcctggctaacacagtgaaaccctgtctctactaaaaatacaaaaaattagccaggcgtggtggtgggcgcctgtagtcccagttacttgggaggctgaggcaggagaatggcgtgaacccgggaggcagagcttgcagtgagctgagatcgaaccactgcactccagcctgggtgacagagcaaaccttcatctcaaaaaaaaaatatatatatatattatatatatatatttttttttttagaccgggtcttcctctgttgcccaggctggggtgcagtggtgtgatctcggctcactgtaacctctgcctcccaggctcacgccactctcctgcctcagcctccagactacaggtgcccgccaccacgcctggctaattttttgtatttttagtagagatggggtttcaccgtgttagccaggatggtcttgatctcctgacctggtgatccacccatcttggcctcccaaagtgctgggattacaggtgtgagccactgtgcctggccgctgagtagtattttgttgaatccactggcagcttaaaggacatttgggcttgagctatgtacagctgctaacacctgtgcactggtttgtgtgcaaacatgttattttttctttctaggacaaatacctgggagtatcaaaattattttttgatatttattattaaatgattttttctttttcttcatagtaatgatattgtgtcctatgtggatttccctccccctaaacctttttttttttttttttttttttttgagacagagtctctctctgtcacccgggctggagagcagtggtgcgatcttggctcactgcaacctcctcctcccaggttcaagcaatttacctgcctcagcctcccaagaagctgggattgcaggcgtccgccaccatgcttggctaattattttgtatttttagtagagatgggggtttcaccatgtttgccaggctggtttcgaactcctgaccttaagtgatccgcccaccacggcctcccaaagtgctaggattacaggcatgagccactatgccctgccccctccccccactttttttttttggtagagatggggtcttgctttgttgcccaggctggtctcaaagtcctggcttcaagcattcctcccatttgggcctcccacagtactgggattacaggcgtgaaccaccgtgcctggtcccatttgtgtttctattcagcagtttgtgtaaacttgaagtctgtgaatccatgtgtgacactcaggtcttaattattgtctaccaagtaagagaaagtgacaatatcctgccctgtgtgaagctggccagccagttaggaattatcatgtcccaaccagcctgggaaacttggcaagaccctgccttgataaaaagtttaaaaatcgactggacacagtgtctcatacctataatcccagcactttgggaggctgaggcaggaggattgcttgagcccaggaattggagaccagcctggacaacaaagtgagaccttttctgtacaaaaaattgctgggcatggtggctcatgcaggtaatctcagcactttgggaggccaaggcaggcggatcacctgaggtcaggaattcgaggccagcctggccaacacagtgaaaccccatctctagtaaaaatacaaaaattagtcgggcgtggtagtgggcgcctgtcatcccagctactcgggaggctgaggtaggagaattgcttgaaactgggaggtggaggttgcagtgagccaagattatgccactgcatgatcaccccagcctggatgacagagcgagacttcgtctcaaaaacaaaaaacaaacaacaacagcaacaaaaattagcaggctgggtgcagtggctcatgcttgtaatcccagcactttgggaggccaaggcaggcaaatcgcaaggtcaggagatcgagaccatcctggccaacatggtgaaaccctgtctccactaaaaataaaaaaaattagctgggcatggtggagggcgcctgtggtcccagctactcaggaggctgaggcaggagaatcacttgaaccagggaggcggaggttgcagtgagctgagatcacaccactgcactccagcctggggatagagtgagactccgtctcaaacaaacaaacaracaaatagcggtaagtggggcacatgcctatactcccagctactcaggaggctgaggcgggaagatagcttgagcccaggagtacaaggctgctgtgagctattatcacgccactgcagtccagctaggtaacagagtgagaccctatctctaaaataattaataaataaaacaaaataattagccaggtgtagtagccagtagctactttgggtcccagctactgtagtcccaggtactagggtggctaaggcaggagctaattccttgagctaaggaatttgaggctgcagtgagctatgattgtgccactgcactccttcctgggcgacagagcgagaccctatatcaataataattataataatacagtatattttacataatagaccatagagctcaatgaatcctcctcacaaccctatgtaggtagatgttatcatgatctctgctttccagaatagaaaagtgaggaccagagagggcgacctcttgtccaaaagcaatacagccaagaaggggcaaggagggttttgaaaccagtcggccaggctctggggctcctaacaagcaaagcagcctggtttctaaaactatagcttctggaagcagccaattcacaggtctttacctcctgactgtgagacctccaaaaaatgaccagggatcttggagtctgtttccccctttgtgaactggggacaatagaagctacttcccaggtctgcggggagaaattaggaacgaagaaggtaaagcgcagagctgaggagctggtctacaggtgctctatacatattagtaataattattaagtttgctgttacaatcctctctctctctgtgaacaacccctaatgatgcgtggctttgagagcaaaaaagtcagggcaaagttttgccacaaagtccagagggcaagacattaaatctaactctcaaggattggtgttggcaagaaagcaaacctctcctccccacgctgtccttaccccgcgtatccgacgagcctaaagtcataggtaagagatctgtagaagcgacgtcaaggtgtggttccctctgtaaggcggagctaaacggtgcattcgcccagcggggaagctagaactaaatgaccgctctgccgactggagccaacgagaatcggcgtaggcgcaatacgggcggaggatggggacccgcccccggggtgggcggggcgtcaggtacttaattcgcgcctggagggaccgaaggtgccgagggctccgcatcgcaaccawgscgctgcgctggggcatcgtgtctgtcggcctcatctccagcgacttcacagccgtgctgcagacgctgcctcgctctgagcaccaggtctgcccgccctccggattctggggaagaggaggcggggggcgggactccagartctaaaggaggagggagtttagggttcaggactagtgagtgggtcgtcattgcagtgaaacgtctgtttccttgctacctccttctccatctctgttctgcaaacctgtggggaaaagaaagatcagattgttactgtgtctacgtagaaaatgaagacataagaaactccattttgaactgtactaagaaaaattgtttctgctttgagatgctattaacctgtaactttagccccaaccstgtgctcacagaaacatgtcctgtattgaatcaaagtttaatggatttagggctttgcaggatgtgccttgttaacaatatgtttgcaggcagtatgcttggtaaaagtcatcgccattctccattctctattaaccaggggcacattgcactgcggaaagccgcagggacctctgcccaagaaagcctgggtattgtccagggtttccccccactgagaaagcctgagatatggcctcgtgggaaaggaagaccttacatcccctagcccgacaccagtaaagggtctgtgctgaggaggagtagtgaaagagggaggcctctctgcagttgagataagaggaaggcttctgtctcctgctctccctgggaatggactgtctcagtgtaaagcggaccattcccattccttctattctgagataggagaaaacctacctgtggctggaggcgagatatgctggcagtgatactgctctgttactctttgctacactgagatgtttgtgtaaagtgaaacataaatctagcctacgtgcayatccggtcacagcacctttccttgaacttattcatgatacagattccttttctacatagacacagtaacaatctgatctctctttcttttccccrcacaaacctgagtgtcttgaggtttggaaaggccttgatgtaagctactatgaagataatttcaatattgggggatttaataacggctttcccccagatctctctttcccagggcccaaatgtccagcccccgtcatctcttcccccaggaccacgtctccccttcccctggccagagcctcctcctttgcctcccttccacccagtttccacgcctgcctcagcccctcaaatccgattcttgtgcccctccaggtggtggcggtggcggcccgcgatctgagccgtgcgaaggagtttgcacagaaacacgacatccccaaggcctacggctcctatgaggagctggccaaggacccgarcgtgggtgagtggcgagggcgatgggggtgctggccgccgcccctggagcggtgccccctggctgccccstgggagatgcaaggctcctcaggatggtccaatccctttgggttccataaagacctttggctgggaggagaactataaaacgggcttggtctgggactggctgtctagtaggtgttaaactacacttagcgttcgagaccagcctcggcaacgtagcaagacccaatctctacaaaaaataacaataaaaataaattagccaggtatggtggcacgcacctgtaatcccagctactggggaggctgaggcaggagaatcacttgaatccgggaagcagaggttgaagtgagccaagatcgcgccactgcactccagcctgggcgacagagtgagacttggtcttagaaataaataaataggccgggcgcggtggctsacgcctgtaatcctagcactttgggaggccaaggcgggcagatcatgaggtccggagatggagaccatcctggctaatacggtgaaaccgcatctccactaaaaatacaaaaaattagccgggcatggtggcgggcgcctgtagtcccagctactcgggaggctgaggcaggagaatggcgtgaacctgggaggtggagcttgcagtgagccgagatcgcgccactgcactccagcctgggcgaagagtgagactccgcctccaaaaaaaaaattaattaattaattaaaaattttaaaaaagagagcgagaatggcgagaggtaacagccccttcctaaggacagctccctaagggagacaggggtgtgaccgaccacctggtccctgggtgctagggcggggcctcgaagttgtgggcggagctmggctgtctgggtgggcggggctgctgacctcttgacctactcccaccctagaggtggcctacattggcacccagcacccccagcacaaggcggcggtgatgctgtgcttggcggcgggcaaggcsrttctgtgcgagaagcccacgggcgtgaacgcrgcggaagttcgcgagatggtcgcggaggcccgatcccgagccctcttccttatggaggtgagggcagaggagcccttccaatatccagcgtaaaagtgcttgccattaaatatggttgccagtgcgcggacggggtcagtgcatttgccaggatgtatctgaatctccttggcagcatctattaccgtgaaagccattgcttttggcccttagcaaacacggcaaggcttactgaaattgcttggatcttttgtcagtctttaagaaaaagatgccggccgggcgcggtggctcatgcctgtaatcccagcactttgggaggccgaggcgggcggagcacggggtcaggagatcgagaccgtcctggctaacatggtgaaaccccatctcttctaaaaatacaaaaaattagctgggcgtggtggcgggcgcctgtagtcccagctacttgggaggctgaggcaggagaatggcgtgaacccgggaggcggagcttgcagtcagccaagattgcgccactgcactccagcctgggcaacacagtgagactccgtctcaaacaagaaaaaaaacaaaaaaaaaaaaaaacaagaaaaagatgccaagagtgaaagtggcatagaatggcaatggcttagtttgggtggggttccaggtagaggttgaaaggaccaaggaaccccctacaaacctgcagtgcagtggcgcgatctcggctcactgcaacctccacctcccaggttaaagcgattctcctgcctcagcctcccaagtagctgggactacaggcgcccgccaccatgcccagctaatttttgtatttttagtagagacggggtttcaccatgttggccaggctggtctcaaactcatgactgcaagtgatcctcctgccgcggcctcccaaagtgctgggattacaggcgtgagccaccgcgcccggcccctacctcaaggtctttcatgtaatcctatccgccaggaccccttagccttgtaaagtcacacattcacagactccggggatcatcaggtcgtggatatctttgggggcaccagtagcctactgccacaacacccaggctcagagcctgcgcagagcctgcccccggctccccagtgccctcaggcctgtgttcacgctcctctcgactgctccgagcccgggcggacctcggccacatccgtcctgccccgcccttcccccgtgagccctgacactcttgcgtcagcatttttagaaattgctggtgtgggccagatgcggtggctcacgcctgtaatcccagcactttgggaggccgaggcgggcagatcacctgaggtcaggagttcaagaccagcctggccaacatggcgaaactccgtctctactaaaaaagtacaaaaattggccgggcgcggtggctcacgcctgtaatcccagcacttcgagaggcagaggcgggcggatcacgacgtcaggagatcgagaccatcctgtctaacacagtgaaaccccgcctctactaaaaatacaaaaaattagccgggcgtggtggcgggcgcctgtagtcccagctactcgggaggctgaggcaggagaatggcgtgaacccgggaggcggaggttgcagtgagctaagatcccgacactgcactccagcctggacgacaagagcgagactgtctttaaaaaaaaaaaaaaaaaaaaaagaaattgctggagtgcagccttgggacctttgcccattctcccggctctcccgtgacattctttctctgggctctttgcctagtccacggagcttccgtctcccctggaatgtcacctcctcagggtgtcaccgtcccggctgtcctgcgtgaaggaccctccattttatttgtgtccttggtattcctttgttcatcccttggttgcctgttctctgtctctctagactgggtgctccaagaggtagaactctggtttttgttgtcattgttgttgtttttgagacagagtcttgctctgtcgccaggctggagtgcaatggcgtgatctcggctcactgcaacctccgctgcccggctttaagtgattctcctgcctcagcctcccgagtagctgagattacaggcatgcaccaccacgcccggctaatttttgtatttgtagtagagacggggttttgctatgttgtccaggctggtctggaacttctgacctcaggtgatccgcccgccttggcctcccaaagcgctggggttacaggcatgagccacagcgcccrgcccccagttccaggagtttttttttgttgttgtcattttgcatttttctacatagatgatgtcatctatgaacaaagagttttatttctaccttctgtatctatatgcctcctttaaggagtttcactaggagatgcacacgtaactcttaaacccactggcctgcatgctctatacctacatctaatctcttcttataaggacaccagtcatattgtcatattggataagggcccaccctaatgacctcatttttttttttttttttgagttggagtctcgctctgtcgcccaggctggagtgcaacggtgcgatcttcagctcactgcaacctccacctcccgggttcaagcaattctcctgcctcagcttcccgagtagctgggactacaggcgtgcgccatcacgcccagctaaaattttttgtatttttaatagagacggggtttcaccgtgttggccaggctggtctcttggctaggctggtctcgaactcctgacctcgtgatctgcccactgtggactcgcaaagtgctgggattacaggcgtgagccaccgtgcccagccttgaccttattttaacataattatctctctgaaaaccctgtggccacaacagttgctttcagaggtactagggagttaaggcttcaacacgtgaattgtgtttggcagggcagaagcgagagggagagagacacaattcatcccataacatggggagactggggcaatggtccagatgaaaaagaacaaaagtcaatagggcacggtggctcatgcctgtaatctcagcactttgggaggctgaggtgggaggactgcttgagcccaggagttcgagaccagcctgggcgacatagtgagaccctatctctattcaaaaaaaaaagaaaaagaagaaaagtcaagagggtcaggagcaagagggatacaacctggggactgatgggctgtgtttggagactgggttgcagtgggtatccccctatgattgggaccccagaagggattagaactggttggttaactcctttccttgtggtctgcaggccatctggacccgcttctttcctgcctcygaggctctgaggtctgttttggcccagggaactctaggasacctccgggtggctcgggcagaatttgggaagaatctcatccacgttccccgggccgtagaccgggcccaggctgggggggccctgctggacatcggcatctactgtgtccagttcacctccatggtctttggagggcagaagccagagaagatttcygtcgtgggaaggcgtcatgaaacaggtaccatctatcctggaatatttcatggtgatgggaatgattctgtctctctgggagcactgaactgaggacaagtctccaagtcaatgagaattagatcagacacctagaggaacaactttccatgaagccagagaggatcagagtcaagactgcaggtgggcactctcctgggactttgctgtgtgatcttagccagcagacttaacatctctgaatcttaattactttactggtaaagtgtcactaatagggttgtcatgggagttaatgaagtaactgctgaggcaaatggcagttaataaatataaaattattattttttgaagttgtctcagtgaatctttgctacaaaaaagactaccccacttggccaggcgtggtggctcacgcctgtaattccagcactttgggaggccgaggtggccagatcacctgaggtcaggagttggagaccaccctggccaatatgatgaaaccccatctctactaaaaatacaaaaattagctaggcattgcggcaggcacctgtaatcccagctatctgggaggctgaggcaggagaatcacttgaacccagggggcggaggttgcagtgagctgagatggcgtcactgtactctagcctgggcgacagagtgagactccatctcaaaaaaaaaaaaagctgccccactttgcagaagaggcccttgccttrgcttccactcagctggaaagtatccaagagtgcctgagccacccagatgtgatgcccttcatctttgacctttaaccccaaggagcaagaggcagttcatgcttcattaaagttacattcagccgcaaaaaaaaaaaaacataacactaccccaaaacttagtgacttcaggctgggcatggtggctcacgcctgtaatcccagcactttgggaggctgaggtgcgcggatcacttgaggccaggagttcaagaccaccctggccaacatggtaaaaccctgtctctacgaaaagtgcaaaaaaaattagttgggcgtggtggtgtgcacctatagtccggctactctggaaggtgaggtgggaggatcaattgagcctgggaggcagaggtggcagtgaactgagatggtgccactgcattccagcctggggaacagagccagaccctgtctcctttttgtggagaacagagtctcgctatattgcccaggcaggtctcgaactcctgggctcaagctatcctcccgcctctgcctccccgagagctgggattacaggtgtggccaccgcccccggcaagccagaccctgtctcaaaaaaaaaaaaaaacttagtgacttcaaatagcaatcatttattagcttgtgattctgtgcattggcaaattggggctgggctctgcttgatggttcttctgctggtcttattcctgcagctgcagtcagttggctgttcagctgggactggacagtctggtaggcttcatttatatcttacaggtggcaggcaactgtctgggaagccttgattctcctccacctggcctctccagctggctagataccattcatatcgtggtgtgagaattcctgatgtgcaagcacttttcaggcctctaattacaccatatttgctactggcccattggccaaagcaagttacatggccagctcagttttcagagatgggcaaatagactgtaatttttgtttttttttagatagtatctcactttgccacccagggtagaatatagtggtgtgatcttggcacactgcagcgtcaacctcctaaattcaagcgattctcctccgtaagacccccaagtagctgggcatacagatgtgggccaccacgcctggctatgtttgtttgttttttgtagagatggagtttccccatgttgcccaggctggtctcgacctcctgggctcaagcaatacacacatttggcctcccaaagtgctggggattacaggcatgaaccaccggctttttttttttttttttgagacggggtctcactctgtcacttaggctgagtgcagtggcacaatcattgctcactgcaaccttgacctcccaggctccagggatcctccacctcagcctcctgagtagctaggatcacaggcacaagccaccacacccaactaaattttttattttttgtagagacaaggtctcactatgttgcccaggctggtcttgaactcctggactcaagggatcctcctgcctccacctcccaaagtgctgagattataggtgtgagtcactgtgcacagccaagactgtacttcgtggtgtgtgtgtgtgtgtgtgtgtgtgtgtgtgtgtgtgtgatggagtctcgctctgtcgcccaggctggagtgcagtggtgccatctcggctcacttcaagctccgcctcccacgttcacgccattctcctgcctcagcctcccgagtagctgggacgacaggactacaccacgcctggctaattttttgtatctttagtagagacagggtttcaccgtgttagccaggatggtcttgatctcatgaccccacgatctgcccacctyagcctcccaaagtgctgggattacaggcgtgagccaccgcgaccagccagcacttcattcttttgccttgccatgcaagaagtgaagtctcttgcccaaggttccacaggcaggatttggggcctgtgcagtctcagagactctgccctgagagaccctgccctgayccaggacttccctccaggtgtggatgacactgtcacggtgctcctgcagtacccaggggaggtccatggcagcttcacctgcagcatcaccgtgyagctctccaacacggcctccgtgagcggcaccaagggcatggyacaggtgaggcatggcgggcccaagcgctggggatcgtgcccctaaaataggagggggacaaatggcctctggagctagatgagagcttaaccagccaatttcacatcattgctaaagagttcctccttaaccaagccaagaggtgggttctgggcctctaggctctccttacttaggatgaacctattgctctgtcaaatattcttgggcctggctggcacggtggctcacgtctgtaatcccagcactttgggaggccaaggcaggcagatcacctgaggtcaggagttccagaccagcctggacaacatggtgaaacgccatctctactaaaaatacaaaaattagctgggtgtggtggtgggcgcctgtaatcccagctactagggaggctgaggcaggagaattgcttgaatccggaagatggaggttgcagtgagttgagattacgccattacattccagcctgggtgataagagcaaaactccatctcaaaaaaaaaaaatatatatatatatatgtatccttgggcctggccggcacggtggtcacacctataatcccagcactttggaggctgaagctggtggatcacttgagccctggaggtcgaggctgcagtgagctgtgattgtgccactggactccagcctgagtgacagagtgagatcctgtctcaaatatctatctttagtcctgaggagaagccagttattatcaaccatgcttagtgggcagttgtgaatttcggaagtgcatccgggggaggatctgggtgttaccaaaggtcagcttaactggtcttcctggggccttgttgctagaaaaaaaaaaaaccctattttatagccaggcatggtgacttacacctgtaatcccagcgtgattgggaggccaaggcaggcagatcacttgagctcaggaattcaagactggcctggccaacatggtgaaaccccgtctctactaaaaaaaacatacaggctgggcgcggtggctcacacctgtaatcccagcactttggcagcccagagcgggtggatcacctgaagtcaggtatttgtgaccagcctgaccaacatgatgaaaccctgtctctactaaaaatgcaaaaattagccaagtgtggtggtgcatgcctgtaatcccagctactcaggaggctgaggcaggagaattgcctgaacccgagaggcggaggttgcagtgacccgagatcgagccattgcactccaggctgggcaacaagagcgaaactccgtctcacaaaaaaaaaaaaaaaaattagtcaggcatggtagtgggcacctgtaatcccagctactcgggaggctgaggcagaaaaatcacttgaacccaggaggtggaggttgcagtgaaccgagattgatccactgcactccagcctgggcgacagagcgagactccatctcaaaaaaaagaaagaaagaaagaaagaaaataaataagaagaaaacatggttcacagacacacaaagataagccctcctctctagaccttaagaacaccttgtttctaagctcctaaggttagggagaggtttgctcctggggagacagacaggatttttgtgtcacatcagcgttgctaaggaacaaacttctagcaactagaaatgaaggagggtccaaagctccccggggatggacagggcaagctcttagccaccaggttcaagagggaggcccctgtgcaccacctggcatgttcctggaggcagcctcagcagcaccgttrgtgaaggcagcagtgccacttcttctctccctccagctcctcaacccctgctggtgcccgaccgagctggtggtgaagggggagcataaggagttcccgctgcccccagtcccaaaggactgcrattttgacaacrgggcaggcatgagttatgaggccaagcacgtctgggagtgcctacgcaagggtaaggatatggatgcggggcaggcgccaggcctggtagggggatgttgggcccctccccacctgctctgtcaccctgctgtttagaactacatctcccaggaggttgcagtgagccgagattgcaccactgcactccagcctgggcaacggaacaagactctcactccaaaaaaagaactatatctctcaggaacccctgcagcatccatctgcctgaaccatgtatattgtgccacatggaattctgggaattgtagttctttgggtcttgggcgcgtgggtaggaggggtccctaactacactctccccacaggtatgaaggaaagtcctgtgattcycctgtcggaaagtgagctcctggctgacatccttgaagaggtgaggaaggccattggagtcaccttcccccaagacaaacgctgatgtatccccgaataaataaagacatcttacatcttcgtggtagtggtttggcagaagctggagaacccagtatcaaagggtcactagaaaagaatttgggcagggctgggcatggcagctcatgcctgtaatcccagcactttgggaggccgaggagggtggatcacctgaggtcaggagtttgagaccagcctgaccaacatggtgaaaccccatctctactaaaaatacaaaattagccgggcataatgacgcatgcctgtaatcccagctacttgggaggctgaggcgggagaatcacttgaacctgggaggcggaggttgcggtgagccgagatcgtgccattgcactccagcctgggcaacaagagcgaaactctatctcaaagaaaaaaaaaagaaagaaaaaaaaaataattcgggcagaatgatgagggaaggccgggcatggtggctcacacctgtaatctcagcacttcgagaggccaaggtgggagacttgcttgaggccaggatttcgagaccagcctgggtaacatgacaggaccttgtctctacaaaaaataaaaatattatccaggcatggtggcccgcacctgtagtcccacctacttgggaggctgaagtgggaggactgcttgagtccaggaggttgaaactgccgtgagtcatgattgcaccactgcacttcagcctgggtgacagagacagacccagtctcaaaaaaaaaagaatgattttggagagggaggaatgtgcagggtcaggaccacattcccagaagctcctggcacagacacctgtgggaagatccaccgtttgcctgtcacggcctctctggggtttgaccctcattgccttggagtgacttttgcaaaacaacttgatttctcacctcaaaaatcagtctttttctggactcctgaaagccacccagcttttgttcttgttgctcttcctgcctgtaattgtctctccttgaattcaatatagtagtcaggctgttcctttggacagtgtcagaaacacaactcagaatgtctccacaaggccaggcatgggggtcacagcactttgggaggctgagacaggaggaccacgtgaggccaggagtttgagaccaggctgggcaacatagtgagaccccgtctcttaaaaaaaaaaaaaaaaaaaaagcctgcacaggaatggaatgcttggtaattaaagccttcagggcagggcaggcatcagcccaggactctgtttttctctatctctttgactttccttggcatgggttttaatggcagcagtgggccatctggtacagccggggccatcatgctggctgctgccgggagggcacagaaaagagatggacagaccctcacccctgcagtccgctgcccggggggctgcccccacagagctgggccgggttttgtgccaggtgagggggagctccaggccgtctctgagtgccagggtcacaggaggagctcacagccatgttgcttcggcccccgatgccagcccagtcctagtaaggacccagagctcccacccctggctgcacatgggtacagtcaggtgccatgcttcatggagctggcaggagctggggacacacgggagccctgccccttccaagatcaggagggtgagagctccccaggagcaactgcagctgcccaggccgtggctgcaatccagacacccccgtgctattgggagctgggagtagacaggagccacacccagttgtgtctatggatgtggatgtgggcctcctgctctacagagcaggcaggagccccgccccccaaggcacagctgcagcccccaaaccggggctgtagacccaggcattcctgcactcctgagaggcctggaaaggcctcccttgtccttgtaggctcagaggtgcctgctaccactgcctggcctctccccactccctctcttgctctgatctcagagtggggttggggctgagcccaggtgctgacattgtccaccaggtgtgcacatgctcagggtagtgctaacatgtgcgagcactctgccaccttggcctcctccagacattgggtgccgaggagcacaagaggggaacctgagggggtgctaagggtggctgggtgctggcgtgaaggtgccccttggtgccagcagcctgggcaccatggatggccatgggaggcagacaggctcctgggcagaagggggcaggtccccagtgaagccccaccttcaggccaggcaggtttgaagcctgggggccagggtgccagtcctgtggactgaagggggaactcatggtgctttttcctgggcccacccatcctgccatggaccaataagcatgcacttcccctctgtgaggcccataaaagccccaggctcagccagagccagcagaggacagagagacaacaggatgaccagctacagagcggagctaccctctccagggctcctctctactgagagctgagcacttggtgggacaacctgcctacagagaagaactacccactgcgggtctcccctgagctgttgtaatactcaataaagctcctgtttgtctttttcacccttccgttgtctgcatacctcattcttcctggacacaggacaagaactagggcaaaggcaccaccagccacagaggtttctggccagaaaagcaacaccccaaagatcctgtaacagtttcaccagttaagtgtaggcctgggcactggagccagatggtgcctgtgacctcaggaaactaatagcgtgtgggtaggaagtgtccctaaatacactctcccccagcctctgtttgtctcttcatcagtaaaggggtactactaactttcctctgctgaggaataaatgagatggtgactgatggggccgggcgcggtggctcacgcctgtaatcccagcactttgggaggccgaggcaggcagatcatgaggtcaggagatcgagaccatcctggctaacacggtgaaaccccgtctctactaaaaatacaaaaatattagctgggtatagtggcgggcgcctatagtctcagctactcggaaggctgaggcaggagaatggcatgaacctgggagtcggagtttgctgtgagccaagatcacgccactgcactccagcctgggtgacacagtgagactccatctcaaaaaaaaaaaaaaaatgagaaggtgactgatatgtagtttggatctgagtccctgcccaaatcccatcttgaaatttaatttccagttttggaggcagggcctggtacaaggtgattggctcatgggggtggctttctcgtgaatggtttagcaccatcaccttggtatcaccctcacgacagtgagttctctcgagatctggtcatttgaaaatgtgtagtgttgggaatagacccccaaaatctggccataaactggccccaaaactggccataaacaaaatctctgcagcactgtgacatgtttgtgatggccatgacgcccatgccggaaggctgtgggtttactggaatgagggcaaggaatccctggccgacccagggtggaaaactgcttcaaggcgttcttaaaccacaaaaaatagcatgactgatctgtgccttcaggacatgttcctgctgcagataactagccagagcccatccctttatttcggcccatccctttgtttcccataaggaatactttcagttaatctataatctgtagaaacaatgcttatcactggcttactgtcaaaaaatctctgttcgaggctctcagctctgaaggctgtgagacccctgatttcccactccacacctctatatttctgtgtgtgtgtctttaattcctctagcgccactgggttagggtctccccaaccgagctggtcttggcagtgtagcaccttccccactctctcctgctccttctcccgccttgtgagatgcttgttcccccttcaccttctgccatgactggaagcttcctgaggcctccccagaagcagaagcctgtgttacacttgctgtacacagtctgcagaaccatgagccaattaaacctcatttttttttttttttttgagatgaagtctcactctgtggcccagggtggagtgcagtggcacgatctcacctcaccgcaacctctgcttcccaggttcaagtgattcttttgcttagcctcccaagtagctaggattacaggtgtgcaccactgcacacggctaatttttttttgtcttgaactcctgacgttaggtaacctgcctgccttggcaaatccaaagtactaggattacaggtgtgagccactgtgcccagcaaacctcttttgtttataaattacccagcctctgtcaggtgcagtggctcatgcctgtaatttgagcattttgggaagctgaggtgggcagatcacttgaggtcaagagttcaagaccaacctggccaacatggtgaaatcccgtctctactaaaaatacaaaaattaggccgggcacagtggctcacacctgtaatcccagcacttcgggaggccaaggcgggcagaccacctgagatcaggagttctagccagcttggccaacatggtgaaaccccatctctactaaaaatacaaaaatcacctgggcatggtggtgcatgcctgtaatcccagctactcgggaggctgagacagcagagatctcttgaacctgggaggcggaggttgcagtgagccaagattgcaccactccactccagcctgggtgaaagaaaaaagaaattaatgggtggcttagctgggtggttccagctcagggtctccctgaaaattgcagtcatgacatcagtcaggactatcttcacctgaaagcttgactggggctgaagaatccctttccaaaatgattaactcacctggccagaggacttggtttcctgccacccgtgtttcgccagagtatgactgcttgagtgtcctcactgtcacacgtgtccgtgcaaagagaccacctaacagactttgtgtgagcaacaaggctgtttatttcacctgggtgcaggtgggctgagtctgaaaagggagtcagcaaagggtggtgggattatcattagttcttataggtttgggataggtgtacaaattacattctcaagagtggggagaatattgcaaagtaccttcttaagtggggtggaggggagaatatatcatatcagttagagtggggcaggaacaaatcaccatggtggaatgtcatcagttaaggctattttcacttcttttgtggatcttcagttgcttccggccatctggatgtgtacgtgcaggtcacaggggatatgacggcttagcttgggctcagaggcctgacactcaccacatggcagctggctttccttaaaggaagtgatctgaaagggaacaaggtggaagctgtagtggcttttctgacctgtcctgtgaaatcacactctgtcatttccacaatatcctcttggtcacactgtttagccctattgagtgtgggcagagaccacacagcagcatgaatacctggaggtgtgactcctcaggtgccatcttggatgtgggcttaatagttttgattcagcatctttattattataaagagtttggctgggtgcggtggctcacgcctgtaatcccagcactttgggaggccaaggcgggcggatcatgagggcaagagatcgagaccatcctggccaacatggcaaaagcctatctctaataaaaatatcaaaattagcagggcgttgtcacacgcctatagtcccagctactcaggaggctgaggcaggagaatcacttgaacccggaggcggaggttgcagtgaactgagatcacaccactgcactccagcctggcgacagagcaagactccgtctcaaaaaacaaaacaaagcaaaacaaaacaaaacacacaaaaaagagttttagtcaggcacagtgacgcatgcctgtagtcccagcactgtgggaaactgaggcaggtggctcacttgagcccaggggtttgagaccagcctgggc

SEQ ID NO: 95871 - DNA, 107365 bp, Homo sapiens
  misc_feature (1)...(107365): n = A,T,C or G
ggagcaaggccatgccatctgcagcggagacttacgtgccttttgggaaaaaattctggtgtgctactggcctgatcatagacaccaagcgaccacattctagagggtaggagataaatcctgcaaagattcaggggtctcccacataagatgtttaggggtccagagttagggcattccaggatatctcatccaaagaaaaagataaattattgcatcttgcacctcccaccatgtagaaagaagtgttaaggcctgataggcctctttgggttctggacacagtatattccacatctggaaatactgctccaacccatgccatcagtgcaggtgacataaaaggctcccagcattaactggagctcagagcataaaaaggttatacagcaggtccaggcagtctgctacttggtcatttgtgcttccatagacggtgttagtgttagtggtaggaaaagatgctgtgtggagttgatgacgagctctactgggagaatgacaacacaggcccctgcagtattggagcaaggccatgccatctgcagtggagacttatgtgccttttgagaaaaactcctggtgtgctactgacctgatcatagacaccaagtgaccatatgccaggaattacccatcatgagctgggttctgccaaacccaccgagtcacaataccaggcagtcagtaacaatgcatcctaggatggaactggtacatctgggacttaaaataagtaagaccagaaggtacaagcaagttccacgagctggcagcctagacccccatgaacaccactactacctcaacacacctcccstggtgcacccttctggttgtaggtaggatcctttatgaccagctgacaagaggaggaaaaatcctatacttggtcaatggagggtctgctcagtatgtgagttcaagctgaaaatagatggcagttgcactatagccccacttagggacagccttgaaagacaatggtgaagaaaaatctccatgggcagagcttcaggaggtgcacttggccatccactcttcctgcacagagaggcatctcaagcacagaatatctatgtactcagtggcagtgaggaatggcctacctggctagccagggccccggaagaagaaaggttggaatggaagatgggggacagggaggtctggggtaggggcatgaggataggtgtctggagtgggcaccaagtatgaagatgtttgtattacatgttaacacccaccagaaaccatccaccattgaaaagccaccatgtaactaagaggacaaaaatatctgggccagttgaccttagtcggcctctgtcatcagccacctagtgctggtactaagggcacatgcatgaaatgactacagtggcagagacagaggcagcaggagcctaatagcatgggctcccacttacgaagcctgattgagctactgccactgctgaatgagcccccaatatggcaccattcctccagaagaccagctggctccacggtgcaagttgacaacatggaaccccttctatcttggaaaaggcaagattcatcctaaccacatggaacccctttcatctggaaaaagtcgagattcaccatgtcaagaaaacgcatatattctgggtactgtttacctttcctgttctcaggaccttagtcagcaccactatttgagggcttatcgagtatctgattcactgtcacaggatcccacataacatccatcaggccagggacccaatttactgcaatggaggtgcagaaatgagtccgtgatcagaggattccctaagcgattcacaggctggatcatccagacactgccagcctgacaggatatcggaatggctgctgaaggcccactggaagcagcagcttggagacagcacttgataagggtggggttcatcttctaggatactccttgaaccaaagacctttatatagtgctgggacctgcagggttagaggtctttgtccccaaaggggaatctttcaccagaggacacagcaagggtcctctgagctataagctacagctgccacctgggcaccttgtatgcagggaccagaagaccagaaggggagtcatcttggctaagagtaacctacttgggtgcctctgagtcctccattgcccaattatgacaataaacaggcttgggaagggcatgctggtcaggggttgagatcttcagtccacgaggcaggatggaggcattagccactcaaaccaggggaggtgctagctgagggagggggagatttagaatggatactgaggaaggagacgataagtaccattgtgacccccagaaagttgcagcagctagggctgtagttggtcccagggacctttctcttctaagtttccagcaggaatcctggaggagctgctcctgaaattggcctgtggagaagaaagaggtgttgctccaaatatgctggagtcatcttcaagggttgactgtggtagtccttgaatcctccttcctccaccctctcttttctgccctttcttctttggacaaatatttactttctttcttttttttttttttttttttgtttgagatggagtcttgctctgtcatccgggctggagtacagtggtgtaatcttggctcactgcaacctctgcctcccaggttcaagtgattctcatgccttagctgcaggggtaggtggtattataagaacatgctaccacacccggctaatttttgtatttttagtagtgaaggtggggggagggtctcgccatgttgaccaggctggtcttgaactcctgacctcaagtgatccgcccgcctcggcctcccaaattgctaggattacaggtgtgagccattgcacctagcccattggacacatatttctacaaatgtttgctgaacatctaaaaataagaagcaaataaataggctggacacggtggctcacgcctgtaatcccagcactttgggaggccacggcaggcagatcacctgaggtcagggctttgagaccagcctgaccaacatggtgaaaccccatctctactaaaaatacaaaaattagctgggcatggtggtgggcacctgtaattccagctacttgggagcctaaggcaagagaatccattgaaactgaggggaggtggaggttgcagtgagccgagatcgcgccactgcactccagcctgggtgacagagtgagactccgtctccaaaataaataaaataaaaataagtaaataaaaggaaaccataggtcctgccaccaaagcggctcctaatggagtgggaaagtcatatgcctctagggaaaatcttctaatagaaatgtcttagcacacacatttctgtggtacataacctggttgtgattgtagaaccctgatacatcccaaagcctcagggggcgtttcatgtgtgatcagaacaggtctggtcaggtgtcacagactttgcccatttttagcctctccctctgctctgaactgctccaccaggaacccccaggggcaacgagactctggggtgaacagctgctgctgatttgcccaagcctgggagctgttgaatctgcccagtgggggcagggcggggcagccgctctccccttgtatttcgctttgtcatgggtggggaggtagggaaggaggttagtttgtatcccagttttttatatggtttttagtaaaatatccttttctgtttttactaaaagtacccttccctcttccttccactcccataggtctcagattctagtccagtgtgggactggttaggaggtaaatgcagtgagacatggaatactaaattgcccctcccacaggcagattgactgggggacaggggtccacagctctgtcggcaacatgagttcagacgtgttcgaagtgggtgcaacttaagtttaagatgggtcctcacctccttgttcatagagctacaagagtgaagaagaggaaaggattaattcatcctgcagaattgagaaagagcttacaaaagaaatgtcacttgggccaggcgtggtggctcatgtctgtaatcccagtactttgagaggccaaggtgggaagatcacttgaggccaggagttcgagaccagccctgggtaaccctgcccctacaaaaaaaaatagctgggcatggtggcacatgactgtagtcccagctacttgggaggctgaggcaggaagattgcttgatcccaggagttcgagactgcagtgagctgtgatggcaccaccgcactccagcctgggaaacagagtgagaccttgtcttaaacagaacaaaagaattgtcacttgatctgggttttaaagagggctgtcagatggggaagggaatttcagacagagggaagagcaaaagcgcaaggcccttagagtgcttgttagttcagacaaagctcttgcttcagggaatttacactccaatgcagtgagatcagcaataaacaaacatgtgcatcctgttaggcagtgataaatgccaagaaaaaaaatcaaacaaggtgatagggcgtctgggagtggcatgggtgctattttaggtggagaggctaaggccggcctttctgcaaatgtgttttttgagcagagacctgaatgaagtgaggaagtacgccacgcgggtaacaagagaaggccatttcaggcagagggaagagccagagtgcaaaactctgagaggagcaggcttgtgtgctcaagaaggcctatgtatctggggaacagtgagagaagagggcagtgggaggagagggagccaccatagggctttgagcagaggtcatgatcagtccatcagtttggagaagaggcttctggaaacatgggcagaaacagaaagaccagttaggaggctttgcaatgatccaggcgagagaggacagggtcctgagtgaaggtgataccagcagaggagcaaaggggtgttggaggatattgctggattctggttatcttttgaaggtagagtcaacgggatttgttgatagactagataacattggaaaggtaggttgttgctgaattgggaattgagacaatttctgaacataccacttccctcttaaaaatttcgtgttaaagtccagactcattagcagtcatttattcatttgcttattcattcaacacatactgattgaatgcctagtatggaccaggcattgtgctaggtgttgcaggtagacacaaaatttaaaagtagggcatactggccgggcgcggtggctcacgcctgtaatcccagcactttgggagtccgaggcgggcggatcacgaggtcaggagatcgagaccatcctgcctaacactgtgaaaccccgtctctactaaaaatacaaaaaaattagctgggcgtggtggcgggcgcctgtagtcccagctactcgggaggctgaggcagaagaatggagtgaacccgggaggcggagctttcagtgagctgagctcgcgccactgcactccagccagggtgacagagggagactctctctctctcaaaaaaaaaaaaaaaaaaaagggcatactttctgcccttacagatcttcagtcagatgggtgacacagacaagtacttaggttattacaacccatgtgacaattgctaccatggggaaatacagggggaaataggggcatataggaaaggtatctaattggaattggcaaggctccactcgtaccttaccccgaggtcagctcagttttgaagttcactctagcagtgctgaccattgcggggctgtgagacagtacagtctgagctcggtcatcagcgggtggccagctttgtctctgccgctccgcggcccgggcttactcgaaggtccccggggaatagcctcacctttgccccacttcccartctagcccctaacttcccgccgtctattggctgcgcagccgcccaatgggcaggcggaaaccgcgggctcgtgctcccggcctagggcgtcttatctcgttcgcgcgtctcgcgagcattaggtgacyggctgaggcggcgcmagttggccgggcacggggctgctgtaaggccgaggttgcggcggaagcggagaccatgttccgagcggcggctccggggcagctccggcgggcggtgagtccggastgggaaggcgaacccagggacggccccccgtcaacccgccgtccctatggggtcttgcaaagatcactggccccctcagattcgaccagccctcgcgcccgcaggccggtccccgcctgggacttgggtccaaagttctggggcctaccctggactccctgcggaacgccagttcggggcagaagtcagaggtttggggtcagggtgaccccgaatgatgtgaatttgcgcgtctgctgccccttcttctggcccactctctgccctgccgtttcccacctttgtcggtcactctgggcactttcgggccgccaggtcctccacacttgctccacacccgagggagcaaaatgtcaccggggaatgccctgttggggaaagtttcaaacctagattcctcccggaggccggcatttctggaagaattaaacactttgggcgcatcgtggctactccgacccactcactgtcaagggcgggggtggggtggggtgggaggctgcgtggccagttatggaagctggttctgctttctggtttatggagcagggctgaatttaggtgattgtatttgtaaaacctgcgatccgatttgacagctttagccagttttgaaaggcagacgtctttttatatgcttcaggctgacctgcttttaaccagcagattgtagattaggttaactggtgacagtggtacattttcagtgtttcattagtgacaaaccacatttctctcttckgttgtgagaaggactgataggaaacatattttccttctcatgctgtgggaaaggagtatttggagactgaccagtcacaagtcaagtaacaataatttatattgtggattgtgtagttttcctagtttacatttaggtgaaatgagaaacaagattggtaaacttgggtcagaaacttacctgatggtttgtaccttttctcctttttttttttttttttttttttctgkgcatggatattttcccatccactcctgggatttttctctctgaggcatagctggagctctttctagatgtctgtagacattagacttttgtttgtttgtttgtttgtttgtttaagagacaaggtctggctctgtttcccatgctggagtggagtgcagtggcacgatatgggctcactgcaaccgtcgcctcccaggttcaagcgattctcccacctcagcttcccgagaagctgggatcacaggtgcgcatcatcacgcctggctaattttttttttttttttttttttttttttgkaragacggggtttccccatgttacccaggctggtctcgaactcttgtcctcaagtgatccayctgcctcggcctcccaaagtcctggaattacaggcctgagctaccgcacctggccttagacatcttttttcttgtgcgtattccttgtttaataaaaagttctgaccctcccctcccctaaagagttcaaaccyatgtctttcaggttagtgtcctgtcttcccctcaggacatgttttctcccggttggggatctagacataaacaagtgaaartcatgaatttggggaaattccaggaacctgagccagaagaatgctgctctatgcagcagttggaaaacagttttgtggacagattacaagtctggcctaagtgaaattataattgtggtgggggatggaatttaggactcagtaattttgtagagctaacagaaaaaaatggaatgattaagtaatttttactatccacatcgttggctaatgtgtatagacattacttccagatattcattgtggtttgccaaagactttgaccttgacttatttttaaaatttgaagtcaagctaagtagaatagctgttttttttgtttgtttgtttgtttgttttgagacggagtctcgctctgtcgcccaggctggagtgcagtggcgcgatctcagctcactgcaagctccgcctcccgggttcacgccattctcctgcctcagcctcctgagtagctgggactacaggtacccgccaccacgccccgctaatttttttgtatttttagtagagacgggggtttcactgtgttagccggtatggtctcgatctcctgacctcatgatccgcccgccttggcctcccaaagtgctgggattacaggcgtgagccaccgcacccagcctagaatagctgttttaaagtcattaagaatgttggagagatttggatttctagcataaaagaaatggtggcaacacttctaaagtggacccatatattaatagggacatatacctgtatttaactttttaaattttgaaatagttgcacttatagaaaagttgcaagaatagtacaaagaaatctcaaaacccttcccctggttttcccagcatgttagcagtttgacacatttgctttatctttccacatatatacataatactatctttctgaaccatttgaaagtatgttgcaaatgtgccctttactcctaaataattgagtgatattttaaaagaacaaagaggttcactttctaactacactgtaattggcaatatctggaagtttcaccataaaatactgttttctaatctatggatgttcaatttkgccagttgtcccattagtacagtttrtagcaattttccttattctggtctaagatactctagatgtcctgcaagtggttttcatgtctctttactctgttagaaaggttcctcagccttcctttgggtttgatgacattggtgtatttgaagagtacaggccttctattttccagactgtcactcaatttgggtttgtctggtgtttcctcatgattagattcaggtcatgtattcttggtgggaatatcacaaaagtggtattgtgttccccgtgcatcatattagcaggtacttaatgttggtttatcccattagtggtaatgctgactttagttacttagccaaagtgttgtttgccaggtttctccactgtcaagttaatactcctccttttgtaatttttaactaatttgtgaggcgattcattgagactatgtgactstcctatttctcatcagacttttacccagtcttagcatctgttgatgatttttgcctgagaaatgattactatgatgcaaaatggtgattttctatttccatgataccttcgtacattttttagttattctactataaggaagaacattatcttcttgcatatttatggatttatggatacatggatccttatttaggataatacatttctaccttatgctgaagttgtctcatgtttgtaaagtggggcccattcaatctgactcctgtttgtttacatatatatgtttgtgatatcacaaagtcaaaatagcttatctcaagtccccactcttgaaattaaaaaaaaaatgttctgtagctaaccattaatgcatttaggaagaggatacatttccaaaaccatattwaaaaaaataaagttaggaattacagttaaaagattaccataaactgttaacgatgtgcatatagttaacacttaacacttaaaaatggttaagatggggccaaccatggtggctgacacctgtaatcccagcactttgggaggctgaggcagatggatcacctgagctcaggagttcgagaccagcctgcgcaacatggcgaaaccccatctctaccaaaaaaaaaattagccaggcgccatggttcacacctgtagtcccagctacttgggaggctgaggcacgagacttgcttgaacctgggcrtttgaggctgcattgagcccaggwagcaccactgccctccggcctgggcaacagagtgagacgctgtttcaaaaaaaaaaaaaaaggttaagatggtaaattttatgtattcttttaaaccactttgttaaactattaggatataagttcaatgacttgcatttggtatctaagttccatttttagttctgactgatttgtgccattgagtaaagtctttcatccttatgtgtgtggcaatggtctttaaagtcatctgttaacaaagatagtttttatatctataataaagagctagagaacacaccaagaggmaaataggtaggcatttgcagttagttaatattcttgcagggatattaatcctaattattgttatttattaatttgytcttgaaattgatttattgaagaataagaagatgcagaaaaatatttatgtggtgagtgaaacaacaatttcaaggtcatttgagtactctttttactgtgtttattgtcaggtgggaaggaatatctatcaggactgagaagctatgaaactggtgtgaaggaacatgacacttttctgtctagtattgatgaataagattgaactctgtaatttgcatgcaaattttaatttctattgaaagaagaaagagagccaattttggtgtgattctaaaagaaaatttattgcataaggtgaattcagtaaaattatgatgcctgccaatgtgtctactaagagtcttgtcctttcttaaagtgaagtaaattgactgtgtttttagtattacagtcaatgtcatataacatttctggtcatgattaaaagctgctatattttattactaaaaggattaaaggaagtatttaaagtacagaaatayacattttaaaaattacaaaatgtatgttaaaatagggataggtgactttatatattatccttttgggtatgactcagaaagattttatagcttattcttgctgtttttctttttttaattaaraagcaaaaaaaccggctgggtgcagtggctcatgtctgtaatcccagcactttgggaggctgaggtgggtggatcacgaggtcaggagtttgagattagcctgaccaacatggtgaaacccgtctctactaaaaatacaaaaattagctgggtgtggtggtgcgtgcctgtaatcccagctacttaggaggctgaggcaggagaattgcttgaacccaggaggcggaggttggagtgagctgagatcgcgccactgcactgcagtytgggcgacwgagcgagactctgtctcaaaaaaaaaaaaaaaaagaagcaaaaaaaccctcccctgccctctataccctcattacacctagtttccaaagatggttggggtggaggtataggttacaatcattcttactactttaggttatgagtgggtttgtaagggtagagagttagattccagctttttttcttcttctaccatctgtggtactttactatgtgaatatacagttcaagtcacagcaagaactctaaaaaactgacaagcaaaaacaatgtcaaaaatgaggctgatgctgggcacagtgtcatgtgcctgtagtcacagctactcatgtggctgaggcaggaggatcacttgagtccaggagaccagcctgagcaacatagcaagcaagacccagtctcaaacaaatacccacccccacaagaaaaaaaaaaaaacaactattgaggttgaaaaagagaaggaccaaaatgtgttcattggacttagccataatgaagtttttggtgactttggaaagattggattcagtgttgtgaaggtgaaagccagtttgcatgagtaactgaaaaaatggaaggtgaggtaataagagttggtgtctgtggaaattattttcaagaaatttagctttgaaagggtgcagagagggtgataacctctttaaatcctgcccacaagaagtatactatcttataaaggccagtcaactttatatgggtatgtggctggcatgagaaagaaaacttcatattttgctatttgcaaccaagtctaaacagagtatagagaacttctctaaaagcatgatggtgtgtctgttttagtgatgtaacagtttatgtactgtttagttacccttatacatgtttagttgattacattatcaatgaggaaacagttgctttttagtttttgataattttaagaaaagttttcatttagttactattcattgagtgccaactgtgtgccagagaggtagataccaagttcacagtggagaacaagacagacctagtccctgcccttgtgatgcaaacagattaaggaagaaacacattattttaagtgtggtcattgttacagaacatagagggtgtttgggagaggtttaatcttgttagaggactggaaaacactgaaaggatatctgtgaaattatgtttgcacactgaggtgccttaaactattgttactgagtgataaagtaatagagcggaggattttctttctttctttctttcttttttttttttgagacagagtctcactgttgcccaggctggagtgcagtggcgccatctcgactcactgcagcctcygctgcctgggttcacgccattcatctgcctcagcctcccaagtagctgggactacaggtgcccgccaccacgcccggctaatttttgtatttttagtagagacggggtttcaccatgttagccaggatggtctcgctctcctgaccttgtgatctgcccgcctcggcctcccaaagtgctgggattacaggtgtgagccaccgctcctggccgaggattttctttagataaaaacatcacttcattttttagttttgtstaaaatcatttatcattgctgtattttttcccccaattttttttttttttttttgaaatagagtcttactctcacccaggctggagtgcagtggtgtgatcttgactcgctgcagcctcaaccttctaggcttaaatgatccttccatctcagccttccaagtagctggggctacgggaatgcgccaccacatctgactaattttttaatttttatctttcatagaaacagggtcttactgtattgtccaggctggtcttaaactcctgggccaattttaggtttgcagggtatctgtgcagatttattatgagtaaaccgtgtgtcctgggggtttgatgtacagattattttgccgcccaggtaatgaacatagcatccaataggtaattttttgattctcaccctgctcccaccctccaccctcaaataggcccaggtatctattgttcccttctttgtatccataggtatttgatgtttggctgccacttacaagagagaacattccatgtttggtttttctgttcctgcattaattcacttaggataatggcctccagcacygtccatgttgctctaaaggacatgatctcattctttttaatggctgtgtagtattccatggtgtatatataccacattttctttacccagtccatcccttgcatgggcatctaggttgattccatgtctttgctactgtgaatagtgctgccatgaacatgcacatgcatgtatctttatggtagaatggttcatattcctttgggtatattcccaattatggtattgctgggtcgaatrttctaagttctttgagaaatcgccacattgctttscgcagtggctgaactaatttacatcctcaccagcagtatataagcgttccttttctctgcaaccttgccagcatctgttgttttttgagttttaaataatagccattctgactggtgtgagatgtctcattgtggtttttatttgcatttctctaatgattagttaatgttgagcatttttttatatgcttgttggccacatatgagaagtgtctgttgatgtccattgcccattttttaatagggttgttttttgcttgttgatttaagttccttatagattctggttattagacgtttgtcagatgcatagtttgcagatttttttttaccattctgtaggttgtctgtttactttgttgatagtttattttgctgtgcagaagctctttagtttaattaggtctcacttgtaagtttttatttttgttgcaatttcttttggagtgttcgtcatgaaatctttgccagggtctatgttcaaaatgccatttcctaygttttcttcttgggtttttatagttcgaggtcttacatttaaatcattttttgtttgtttgttttttgagatggagacttgctttgtcacccaggctggagtgcaagggtgcaatcttggctcactgcaacctccgcctcctgggttcaagcaattctcctgccgcrgccttcggaagagctgggattacagactcctgccaccacgcccagctaatttttgtatttttagtagagacaacagggtttcaccatgttggccaggctggtctcgaactcctgaccttaggtgatccactcgcctcggcctctcaaagtgctgggattgcaggtgtgagccactgcacctggcagaagtttttttgttttgtgttgttttgtttttaagtagagtttggcctgtgtggtagtacacatctgtagtcctagctactcaggaggctgaggcaggaggatcccttgggcccaggaattggasgccagcctgggcaacatagaaagacactgtctctaaaaataaaattttttgaaaatagactttatgttttagagcagttttaggttcacagcaaaatccaatggaaagtacagagagtcttcctggtccacacacccacaacctcctccactgtcaacatacagcaccagagttgtccatttgttacaattaatgaatttacattgacatcagcatttcccagagtccatagtttacattaggattcactctttgtgttgtaccttctatgggtttggacaaatgkataatgacaggtatctaccattattatatcatacagaatagtttcactgcccccgcccccactccccctggaaaaaacaaaacaacaacaacaaaaaacctctatgctttgttctcctaatccctggcagtcactgatctttttactgtttctatagttttgcgtttaacagagtgtcatatagttgggattagacagcatgtagccttttcagactgttttttttttcactaagtaatatgcattcaaggttcctccatgtcattctcatttcttgttactgctgaataagattccattgtatgaatatttattcacttactgaaggacattttggttgcttccaagttttggcagttatgaataaacctgctgtagacgtctggtttttgtgtggacctaagttttcaactcatttgggtacgtacaaaggagtgcagttgctagattgtatggtaagattatgtttagttttataagcaactgccaaactgtcttccaaagtggctgcaccagtttgcatttttaccagcaatgaatgagagtttctgttgttccacatccttactagcatttggtattgtcagtgttttggttttttaccattctaataagtgtgtagtggtatctcgttttaatttgcaatttcctagtgagcatcttgatgttgagcatcttttcatatgcttcttggccatcttctttggtgaggtacctgttcagatcctttccccctatttaaatcagattgttcattttttatgttgacttttaagggttctttattttttttagataagtcttttatcagatatgtcttttgcacatattttgtcccagtctatggcttgtgttctcattcctttgatgaagaggtgtttgttttgttttgttttgttttgttttgagatggagtctctctcgcctaggctggagtgcagtggtgtgatctcggctcactgaaacatccacctccagggttcaagtgattcttgtgccttagcctcctgagtagctgggactatggcgtgtgccaccatgcccagctaattttcgtatttttaggagaaatggrgwttcactctactgaccaggctggtctcgaactcctgacttcaggtgatccatcggcctcggcctcccaaattgctgggattacaggcgtgagccactgcgactggccaacgaagagttctttaaaaaaaatgttcacttcccttattggtgtcagctctgtgctggatactggagtctagggttatagtggtaagaaatatcagacattgctcctgtactcartatcaaagggggamgagaagacaatcaggtgaatatgatcaggtgtgataagtgctgtaatgaaggcaattacaaggtaccatgttggtgctagcaaagctaactagtccgagacggtccaaagaaggcttttatgtgtagctaacatttattgaggattaatatgttccaggcatcattctaagagctttacatttattaatttaaccctcacaacaactctatgagatattaatattattatcatcatctccattttacagtcagagaactgaggtactgagacgttatggtggaggtgggattcaaacccaggcaacgtggctggctccaaagcctgtactctaccactgcaactgtactaatgctttttggaggaattgacctttcagcagaaaacctaaggatgattaattggaatttagtagggtaacagggaaagaggtccactaggcagagggagcaatgtgtgggaaggctggaagtctgagagagcagggcaagttcaagtatctgaaaataaggcataaatggagtgagggatatatggttagggaggtagatcacgccataaaataaacacatgataaaccaacctaaggagtctagtttaccatatccagaggaggcagaaagcaatagcagtgttttaagcaggggagaataacatgttagatttgtgtcatggaacgatcactgagagaaatagattggtaggaagcagaattgtaggttagaaacaagctgggttgggagactctgtggggtaatagaggagaaggataatggcctgcactaggatattggcattgacgatggagagaagtgaatggatttaggagtagctctctttagaaggaagaattgttatgacttgagtggttggttagatgtaaggttgagagaaaacccagacatgattctctggtcatggttggggcagatcgaagtctggagaagtagcagtatggggaaggggctggaggaacagagggaaaacatgagttaaagtttaaatttgctgagatggaaagtgtttgatgagacaggcaagttaagcacttagatatacagatgtaaccatattataagtctagcacttaggaaagagctttgaaccctatttgagatttatatatataaaatatttgagccactcttctataggggttaaattaagccatggaaggcagaagggagtagtcagtaactttaaacattgctgagataacaagtaacataaagcctgaaaagggtttgttggtaatttgggtgagggcaaaaaccagatgcaagtaattgaggagggagtgagaatgaggaattagagaagctagagttgaatgtgggtttgtggctttttagcaggattgttgcaaatggggagagcctcaatcatgtttaaatgttgatgagaaggaaccagggtaaagggagaagctggagacatgactgggaagtgtagattacagtctctgagtagattcgagagaatggaatctagatcccagatgaagggattagacccaggagaaaggatccacagcagcttccattgtgatagggcaaggacaggaattgtaatagggcagggacaggaatttctatgttgagtatcagaaaaggaaatcaggtcccttgatggctttagttgtcattgtgaagtaggaggtgaggctaccttctaagagtagggggcagaatgtgttggcagtttaagaaacatcaggaggcaggcacagtggctcatgcctgtaatccaagcaytctgggaggccaaggtgcgaggatcgtttgagcccaggagttcaagaccagcccaggcaacacagcragaccctgcctctacaaaaaataaataattggctggacatggtggcgtgtacctgtggtcccagcgacttgggaggctgagatgggaggaacgcttgagcctgggaggttgaagctgcagagagctgtgattgtgccactgtattcaagactgggtaatagagggagactttgtttccaaaaaagaaaaagaagaaacatcaggagaggatatttgaaatcattgctgtggagggtgagagtgcgaacaaggaagttgtggtagcattgctagacagttttgagagcccaggtaaggctgatgactaagaatttatggatggcataggcctgcatagttaatttttatttaaatagcagtgtttgaagagatcgagattccttttgaggcaattacctcgttaagtatttcaatagttatctttaaatgtttaagaatttggctccttttcctctcataactattgttaaaagaggattgatcctaaagtgtagagaggcaatgggttataaaataataaaatgaaaatttgtttcctttaaaacsttttcaataatggacatgtatttttttactctttagtcatattctgtactactcttctgcttaaaataggattttagagttatagaatttttagagcaggaaaagaggtcttttgagattatatttttctttctgacaatgctatttttttttttaagcacaagaatgtttgccaagtgcaatcttasaggaatgacccatgtataaaacagctaaaaatggtggtgctttgatgtgtgctggtaattaggaactcaaactgtggagtcagactacctggacttagaataacctgactctgcttcctacctgtgtagctgctaagctccagtttcctcatctgtgaagtcagagtaatactagtacctccatcatagactttgtaggaattttaaataggatactatgtataaaactgcttagyacagtgctccatcaatgttagtttggttaatctggttaaagcaaagttgggtaggggggcattctagcagctgtacatgcctagtccctaccttatcccatgtggtggctcctgagatagcttcctagaacccttctatagatgcagtttgaaaatctctaatcttggctaggtgcgatggctcaatctgtaatctcagcactttgggaggctgaggcaggcagatcatttgaggtcaggagttcaaggccagcctggccaacatggtgaaaccccactctctactaaaaatacaaaaattagctgggcgtggtaatgcatgcctgtaatcccagctacctggcaggctgaggcaggagaattgcttgaaccctggaggcggtggttgcagtgagtcaagagcacgccactgcactctggcctgggcaacagagcaagactctctctcaaaaaaaaaaaaaaatctctaatctgattcatcctcctaaatttgcagatgggctttagattgtagaataacattttaaaagttcaggccaatttcttctgctctaggttctacacaaccgctattgctgaattaagccgcataaccatgcctagaggctgtagcttctctctaggtggtatctgagaaatggaatgtaaaacattgaattagaaggaagtttaatattttaaaaattatagaggagtcaataaaatagagtacctttatgatgtatataatgcttagtaaaaatcgatcagctagatggactgagtgggttcttaaatatgttcttttgttgtttatgcttataaatctaattttgataaatcttttaaaaagtatatataatctccagttggaagttctaaaagcttgatggttccttaggataactacttaatttatcttatgatagaactataatttacagcaagtatgggccttctgccaccaaatcttggattttttcttcaaatggtgatggaaatctcataatttttatggcaaatgatgtgtgaaacataataaaaaatatgatgccggatatatattggtaataaatagcttgttactggcaattcttgtgaaawgtgatttaaataatttaaattattttttatttttaattattttattaattttatttaattatttatttattacaaagtcctttccaaaatatgatgctcttccaacgaaaaaagaaagggtaccatataattaattctgcagatgtacattggaaaacaaacattgtatttgattctggggatacaaaatataaacaggtatggtatttgctttctaagaactttcatttcattccaggaactgtcctgacttcccttcaattcataccctycttttaagtttccagctctgggtaaattccatgctatgctttcttcactccagctccagagcttaaggttattgctgaattaagccacgtaaccatgccatttgatccacagttcctctttttctcacttttctttgccattttccataagaatagttccaagattttattttttccttatgcctatggtgccattcctcatcttttcacatgatagaacacctgaacttccytccttccccacttgactgtacttcatgatctgtagccttcaacattttggatctcttcattatttgaaaaactgttctattttataattgtatatgaacaagtctaatttcctgtgaaatatacagggaccattcttgttcatctttgtgttccttgtgtttaaaattattccacatgaccatgaatgattggtggtttcttgatagtctgcattagatagggctggatattggttggttccaagatactgtctgcaagcttccttttttgaatccagaagcatatttgaacagtcaaaacctggcaaaactgctgtttagtgtcatattttaaaaacatatttccattatcaattattttggtattgaatgcattttgactgaaacaatagggatcaactttcgtgrctgatttcaaacccattatttgtgattatactgtactcctatactgtaggagtacagtatgtaaccaaatgtaattggtagtagaatttgaccagttcctagttaggtagttaatatgttctgtttaaggaatttacatttagttatatagtagtttcttatcagatgtagattagtgggaaagttgttttgaagtaattaaacatttttcctaacaatagaaggctaatttgcgttctaatttttattagataagaatattagtaggccaggtgcggtggcgcatgcctgtaatcccagcactttggaggccgaggcaggcagatcacgaggtcaggagatggagaccatcctggctaacactgtgaaaccccgtctctactgaaagtacaaaaacaaaattagccgacatggtggtgggcgcctgtagttccagctactcaggaggcggaggcgggagaatggcatgaacctgggaggtggagcttgcagtgagccatggtcgcrcgcgccactgcactccagcctgggcgacagagcgagactccatctcaaaaaaaaaaaaaaaaaaaaaaagaatattagtggtacagtgataracacaaatagctagattttcgctatagaacaagtattttataaataaatttatagaataatattgtgtacagaatagttttctttaaagcatacatgcttaacaattagtaaaaaaaaaaaaaaaaaccctgtgacaacattctttacctttttttttcctttttgctctttttaggcctcattgctacgatttcagagtaccctggtaatagctgagcatgcaaatgattccctagcacccattactttaaataccattactgcagccacacgccttggaggtgaagtgtcctgcttagtagctggaaccaaatgtgacaaggtgagaaatttttaakgtcagccatagcaaatattatctccatcaagagacaggaaaagatggcaacagagaattatgcttaggattgtaacccaaactgggctctaatcctcattaaatggtcagtgtcacaaccattaccatgtgtgaaaaangaactaaaaggtttcttccctaagcattttatcttttgaaatgcagtagaatacttgatttagttccactggcaccatcatgtgccatcaggtaccaagtggaatgataatatttgagtccccttagaggttaatagctgatctcttttttgtgttgatgaatatacttggtaattgcttctaattcctgaaagtggtaaatctggacaaagtattatggatgttaatttttaattggtagaagaatttgaatgttaagtactattctttccaaactctagctggtactaaaagatgttcttgggtttgtttgttgttgttgttgttgttattgttgaaatcagatgataacagcttggaacactaaccctctagaaaggtgctatgatatgatttgcagggtctrtaccaccagcctgcaatatagatgagtgcttcagttaagcttacacaccttcagccaccagttccctctcacatggtataggagttgctgagtgtgtagttgggggcttaaacttcacagaggaataaatctgaagggagtatgttttgaggattttatgttttattaaataattgatgctggctgggcatggtggctcatgcctataatcccaggactttgggaagctgaggtgggtagatcacttgaggtcaggtgtttgagaccagcctgggcaacatggtgaaatcctgtctctactaaaaatataaaaattagccagtgtggtgatgcatgcctgtagtcccagctacttggaaggctgaggcacgagaaccacttgaaccttggtggcagagtttgcaataagcagatattgtaccactgcactccagcctgggtgacaaagtgagactgtgtctcaaaaaatatattaaaaataacaataattcagagcatgtgataatggaggttcatactgctggtgttgcttctgtctaattttttacatgaaattgataaaagaacatattctggtgggtttatgattagttatgtggatttctttacccaattcctgctaacaactgtaggatcttacatagttgatacagccacaatgtgtgatgtgtgatggctaagctatctatttgtatgtctgtattagccacagtatatgatggctaagctatctttttggtttccctgtttttggatatataggaatttgtgatttgttgtttgttttgctgtgatttaaaataattattgtaatattactttaaaaagactttgatactttatactactttgagaaaaatcaaaatagaaatcgtcttctgtactcagttacaatcctaacctgtcatgttctaattttaaagaaaacaaccagtacctgtatgaagagatcgtttaatagagttcggttttataccattttattcagctacttgtcataaacagcaagttattcttctgtataatgccagccgttttgccagtaaaaacaagatagtttcaatgggaaaattctgccccattttctatcccatgctgctatgcagctacattgcaattaactgagtttcttaattggaaattctcttaaagtttgagaagctaaatgcagctgcatccataataaagggcctctgtagtacaaatggtatgccggtgaacacttggtttagcagagaatgtattcttgcactgcatcctttcttcagtgaatattgttgcaagctaacagttcatatgagggtggcacaaggcacagccttttaatcctactcatcagtgaatcaatgaatcagtttggaggtaaacaaggagacagaagacgatagtatgactgatatgacttagctaaagtggaaaccagccatgaggtaataaagatacttaaaaaggggaaatctaattgccttctgaatatagaaaatctgaatcatcaaaaagctttctcagaaccccattctaattccaaacaggaaaaatgaagaattaaaataggaaatattttgctttgtcatagataaatatgtgtatgtgggcaggaactcagtggttgacaatgggatgttactagagaacttcattttcaccatttccaggacattgaacttacacttggattgaaccaaaagtaaaaagcacaatttataacaaaatttgaataaagagccatgttgattttggtttgtcaattagcacttttctttttcaaggcaggaatttttgttgaaatgcttggtagttggacagtgtaaggtcagtcagtagtaagatctattggcattagattttctttgttaaggaatgtattttaatattttaattctttgtttgtttgagatggagtttcactctttcgcccagtctggagtgaagtggtgtgatcttggctcactgtaacctccgcctcctgggttcaagccattctcttgcctcagtctcccaagtagctgggattacaggtgcccgccaccatgcctagctaatttttgtatttttagtagagatggggtttcaccatgttggccaggctggtcttgaactcttgactccggtgatctgcctgcctcagcctctcagagtgctgggattacaggcttgagccactgcgcccggccggaatatattttaattcttaactggcccttttgctaataagaataatttttacagttggccattaagattttatgatctgttgatatttatagtggtggctttatttgtatatttctgatagatggataattaggaacttatcttttaatcataggtggcacaagatctctgtaaagtagcaggcatagcaaaagttctggtggctcagcatgatgtgtacaaaggcctacttccaggtgaggttttccagtagaaaaaaatgtagtgtctaaattacgcttgaatatatgaatatgaaagtatttcaaaatatttttttatcaaatgtgtttaattctcagaggaactgacaccattgattttggcaactcagaagcagttcaattacacacacatctgtgctggagcatctgccttcrgaaaggtgagaaggttgagaatgtggaatytgatatcactgcttgaaagggttagatttcattgtgctgaaagtatgcaacagactgtttatgtagccaatctggatttatctgaattgatgtggtagttttgctaaaatttattctttcaagattttgtcataattttccgttaaaactaccatttccaggttttcaaattatgttgtggagaaaactctaattaggctattattttaaaattttctgcatgtaaaagtaatgctgaattctgcttgcatgtgagagagagagtgaacgagcaagagtcatttctattagtagcccattttaagagatggtttatttggatggctgatggatatctagaaaagccaaattttatctacgtagggaatttggaaagggcttgtggtggttgaagacatccttaaggtaaagaaagctgtaatctgatcatgtgcattgtgatgtgtctgaagaatgagtgtgttataagatggatagcagtctacataaagttaaaaatggagggaggagtgtaatgggagcttaagacaaggaattcgtcagtggatttttcttgctctctctctgtggccgtgggtgttatcttagctctcttttcttttgttccattcttaataaggtgtcatttttagtctttatttttactttcttttttttgagatggagtctcactgtcgcccaggttggagtgcagtggcgccatctcggctcactgcaggctccgccccccggggttcacgccattctcctgcctcagcctcccgagtagctgggactacaggcgcccgccagctcgcccagctaattttttgtatttttagtagagacggggtttcactgtgttagccaggatggtcttgatctcctgacctcgtgatccgcccgcctcggccccccaaagtactgggattacaggcgtgagccaccgcgcctggcctactttttttttttttttttttcgagatggagtcttactttcctcgcccaggctggagtgcagcagcacaatctcagctcactgcaacctctacctcctgggttcaagccattctcctgcctcagcctcccgtgtgtagctgggattataggtgcgtgccaccacacctggctaatttttgtatgtttagtagagacagggtttcgccgtgttgaccaggctggtctcgaactcctgacctcaggtgatctgcctgcttcagcctagctctgttgcccagactggagtgcagtggcacgattgtagctcaacataccctccaacttgtgggctcaaacgatcctcctatcctagccttctgagtagctaggactacaggtacatgccaccatgcccagctaattttcaaattttttgtatcgatgtagtctccctatgttgtgcgggcttgtcttaaactcctggcctcaagtcatcctctcatttcagcctcccaaagtgctaggattacagacataagtcactgtgcttagcctattttcacttttaaaaattgtaaaataagttgtacacaaatacatccttattaggaagactgcgtgtagtacagcagtgtgcagagcaaggtgtcaaagtcctgctttcttattcccaactcaccctcccctctttagaagtatagctgttaacaattgtacattcttttaggcctccttctatggatttttaaattacagtacatgtacagctatatattttttacttctaaaatgggataatatggcatgaattgttttgtgaatagtagcttttacttaagagtatgacttgggcagggtgcggtggctgacgcctgtaatcccagcactttgggaggattgtctgagcccaggagttgtagcccagcctgggcaatacagtgagatctcatctctacaaaaaaatgaaaaaaaaaaattagctgagtgtggtggtgcatgcctgtggtcccagctacttgggaggctgaagtgggagaattgcttgagcctggaaggttgaggctgcaatgagctgagattacactgctgcactccagcctgtgctccagggtgacagagcaacaccctgtctcaaaaaaaaaaaaaaaaaaaaagagtagcgactttggctcataatgtttctctttttttatggctgcataagattccatrtttagctaaggacagttaacttggttccagttttttgcatttatatactttactgcaagaaaacatggtcatgcatgtatctgtgtaaacatgggctggaatttatttacaatagagttctagaggtgaaatcactgagtcaaatgctatgtagtttaaaaattttgatacctattacttaattgtcaacacttggtagtatacattttaacattttttcctccagtctgatgggtgaaataatctttgtggaccgttctgtctctgagagttttgattatatattggatgatttaaataatttcatgagccttgagtttccttctatgatgacagttcacctaacagagtgttagaccatgaaagggtgtttgtcattagctagattttagtactctggccatgattgctatgttgtaacagatgggagttttgagaataagggtcacataatagtagctggtcgtgcggcctgtaaatgggtttggaatgagaaacgtctatcagaagaagccaaacaatttgctgtatgatagtccttcaccagctgtggttttgagataacacacttttatacttgtctgctagaattttaaaatatgtcattttttatgcacaaaaagaactcaattattgcttcttcttcccagaaaccatgcaggcagcttgttggatgggatatatttttaataggatagatatctgtgtaccatccaccctcatgatgtttagatagaagaccagatccaggaaaacatacttttaagtaccatggtaaaatttcttgaagatatgttaaacaagggataatgaaaatacaaaagacattaaattttgagcaatttagaaagttctaaaacttttaaaagaggcaaagtctgtataacataaaatttgtaagataatctgttcagccaagtaactattccagtaataattcctgaacagttaaagaaggtggttcaggaggaggattacttactgaagctagctttaaatactgacaaatctggtttttaaaccarattaagtaggtgcttcagaatgggcatggtggctcatgtctgtaatcccagcactttggggtgccaaggcaggaggatcagctgaggccaggaattcgagaccagcctggacaacaacgcaagaccccgcttctacagaaaaaaacaaaacataaaccaaaaaatgagctggaygcagtagcgtgcgcctgtagtcccagctactcaggaggccaaggcagaataatctcttgagcccaggagttcaaggttacagtgagctatgatcacaccactgcaagttcagcctgggtaacagaatgagaccctgtttccaaaaaaaaaaaaaaagaagaagaagaagaagaattaactgagacttggggaactgtgactttcccaaggattcctgctrctgaggacaaagttagcacatgcatctatttcagtacaagcacaagaacacacctttattttatttttgttgctttttaaatatgtactacacaggctgttcttcaggttagtgttattcttttccttttttttttttttcttttgaggcagagtctcgctctgtcaccaaggctggagtgtggtggtactatctcagctcactgcaacctccgcctcccaggttcaagcaattctcattctcatgcctcagcctcctgagtagctgggactacaggcatacaccaccatccccggctaattttttgtatttttagtagagatggtgtttcaccatgttggccacattggtctcaaactcctggcctcaggtgatcctcagcctcccaaagtgctgggattacaggtgtcagccactgtacctggccttactcttttttttatacaatatcaatttaaacaaaaggtgaaatgtctgctgtgaatttttttcttttatatacattaagtaaatgtatacaagcataatctttttcagtatttgagaattttaccacccttctaaatttgttctatcttttcttatctaaattcaataatccacaactgtcacacttggtaattgatgtttattaaatttcatatctcatarttcaatatattgcattaagrtggcttaatactgtaaaactcatgaaactcttaatgtagttagagtaatggtaagtactcaatctcaaaggctatttaaaaagctgtgcttgaagttgtgtatccaaaggtgcacacgaaatataaaatatttgaattaaaatttctacagaatatgcatttagaatatgtcattactgatcatttatagtcttccatcactatgtatgtgtgttaactcactgcttattttgcttttagaaccttttgcccagagtagcagccaaacttgaggttgccccgatttctgacatcattgcaatcaagtcacctgacacatttgtgagaactatttatgcaggtgagtactcaaggaagataattaatcaacatgttaaattttagtgaaaagcataaattaatcttgaagatagrattttaaatcaaaccatacaattgctttaagtggaccatcttaaaggtttctgaggaaaattttagtctagaattgctggtggcccttgacatggcattctctctgatggatcgcaaacacagagatttcctgcctgtttattcagtttgcagggtgatattttcctagtgatcaataaaaattagattcacaatttaatatattttgtaagtggtacctggaaaagcaaaacttaaaaaaaaatagtattctcaatctttgctgcttctacttcatttccataggcattaagaaattcattttagccagctgcagtggctcgtgcctataatcccagcactttggcaggctgaggtgggaggattacttgaactcaggagtttgaggctatcctgggcaacataataagaccctatctcaaaaataaataaataaaataaattagctrggcatgttggcatatgcctgtagtcacagatacttgggaggctgaggtgggaggattgcttgagccagaaggtcgaggctatggtgagttgtgatcatgccacagcactccagcctgggcaacagagmaagaccctgtctcaagaaaaagaaaagaaattcatttcagtgtctcttcagttgattttttgcttagcacactggtctctagtggggtcggagaaggcagtgaactcttcgttttttgcctgattaaagttgtgtattccagtatgaatggctaattctgaaattagacttttcatcttccataatgtttgagggaaaatattttgtcatggtttaggttactgttaatgtgatagctaatccagagtgtctcaaatcctcttaaaatcttagcacattcatacctgttctttatgacctaytgtgttttcaagatattcctcctttagcatgcacagtagctacattcttcctaagttgttgcagctcatagttttgagttactgattgtattgtttttggagaaggaagctttgttcatattccttttagaggtgtagtgtaccttcttagtgtggatgcctgttcgagtttcttccttctaggtgtggtagtacctgtcctgcttttaaagacatccagggttatacagatatctrctgatatgtttcttcaccgttatggttcattttttcctatacttaatagagttagaagacaactggtcaatagttatttcttgccttgtctgtgaagtaaattccaagcatcaaaggagtgctagttttgttgccttttgctgttgcttttaagaaatagattgtatgtttcaggaaatgctctatgtacagkgaagtgtgatgagaaagtgaaagtgttttctgtccgtggaayatcctttgatgctgcagcaacaagtggcggtagtgccagttcagaaaagggtgagtgttcwtttggagtttttttgttttgtttcttacttttttaattcatagactgtattataataagagatgacctctgcctacatttctaatgaatagtatttgaaagttcaatttaaatgatattcccaagcttatacaaaaataataaatatgtataacttacatctttttcacattatctttggtactaggatagttgctttggtagatcaagggagtgggagacagaggatctattaagattaagcttttttactcttgtcactgtttcctattatatttgggtgattcagtataacagaagaatgtaataggaaacgtgtggagggtgtcacactttaacatatatagtgtcttatttgaacctcatagaaagaaagttattctatattcagactcagagaattgaatgatttctggagtcatacagctaatgtggcaaaggctggaatctagtctccttaagtctttccattatcagagagaattaattaggagcactgaaaattcacagtaattaacttaaatttcgtggaattatatacttgtgtgtttctcttgaaaataattcttgttatagaacttgaaatcatagtcattgttttattatgtattaatgtatgcagcatcaagtacttcaccagtggaaatatcagagtggcttgaccagaaattaacaaaaagtgatcgaccagagctaacaggtgccaaagtggtggtatctggtggtaagtgaaatattaatcttaaaagawgtaaattgaaaatactttgatttttttttttatttttagtatttattttagaagtacacagatctttttcaaatgtaagaagttgggaagtttgggatattattcccatttaaccaattaggaaaatgaaattatgagcataatacacagtttggggtttctgttgcacacctagtcactggcaccagggggagcatggtataaatcttatctgcataactttgccacttggtgccatcttattgatggacttccatgaattctgcagagtatggttggcttctcaattatagatagaactggcttgaatttcagggccatcttgtgtataattcctacccttctttccacttggaaagatttccagagttgtccatgtctttgtgtataactctttaaaaagtttcttaacatttaatatcaaaactgttaatattgcataagacatgcttatttttatacatcatgctccttgtctttaaaaacaatgatttttttatggcccactgactaactttttgaaaaaataaggactgttatgctttttaaatccttgcaattaaacatccaacaaaataagctttcagacagccttctattgcaagtatcattgagaaaaaaaaattaatattttgaagtgatatatctgacttgtttttcgttttctttttttctttttgagatggagtttcgctcttgttgcctaggctggagtgcaatggcacaatctctgctcaccgccacctccacctcccaggttcaagcgattctcctgcctcagcctcccgagtagctgggattacaggcatgtgccactacgcccagcgcggtgactcacacctgtaattccagcactttgggaagccgaggcgggtggatcacccgaggtcaagtgttcgagaccagcctggccaacatagtgaaaccccgtctctattaaaaatacaaaaaattagctgggcatggtggtggatgccagtagtcccagctactcaggagggtgaggcaggagaattgcttgaacctgggaggcagaggttgcagtgagccgagatcgcaccattgcatttcagcctgggcaacaagagtgaaactcctcctaaaaaataaataaataaataaataaaaataataattttgtatttttagtagagacggaggttctgcatgttggtcaggctggtctcgaaatcctgacctcaggtgatccgcccacttcagcctcccaaagtgttgggattacaggtgtgagccaccgagctgggccctgacttgtttattcacttatttattcaagaaatgtatattggttatctgttctatgacaggcttattgccaagtgctggagaaacagatgaaaaggcagaatgttcttcctctcgaggagtttaaagtccttgagatgactcccattcaaataataactttattcagtcattcagagaaatttattgagcatctattatatgtagagttttgctaaatattgcagatatggcagtgaccaagatagatatagatcctgaaattaaagagtttttattctagtgggaaaaaaactcatattaattacacaattagttaactaggtaatcatagtagtgttgaatgctttatagaagtataggagtgtcagaggccagaaaaggtttatagaggaggtgacatgcttaatatggcagttacataatatgaaaatttactccagtatataaaatagcaaaattgttccagaatgtatttgatgtttgcctaatttttttttttcatctttttaaatgaggtcgaggcttgaagagtggagagaactttaagttgttatatgacttggcagatcaactacatgctgcaggtaaagttattttccttagtagaaagatattccctttttgttggaaatattttttcttcattatttcatttttgtgtaagtctttcagccctacaaattattttacttttccggatttttcagtttttctctctgaaccagtttttcttaagcctccaagtaaatggtatatagcattcagtgaggagaaggcctcctagtatctcttacctttgcctaatcttagtaggttttcttttttcttcactttaaaaataatgaaatgggccaggcgcagtgacacacacctgtaatcctagcactttaggttgctgaggcaggaggactgcttgagcccaggaatttgagaccagccctagcaatgtagtgagaccccatctctacaaaacgtttaaaaattagccaggcatattggtgtgtgcttgtagtcccaggtactcaggaggctgaggtgggaggattgcttgagcttgagaggtggaggcgacagtgcactgtggtcgtgccactgcattccagtctgggcaacagagtgagaccctgtctcaaaaataataaaagacaaaataatgaaatgttagtttcagtgcctacttcagattcaggaataccctggtttttcatcttttttttggtggtcttaatataactcttatacaaatagaaatacatttaaagtttttaagtttgtagttaaaaatatagaattgtagttaaccatttataggtaaggtagaacctattgctaaaagtacattgatgagaagggagtgatgttttttgaaaaaccaaaaaaatttaagccaggcacagtagcatgtgtctgtaatcccagttacttgggaggctgagttaggaggattgcttgaacctaggaatttgagaccagcctaggcaacctaattgagaccctgttttgaaaaaaaatctttttaaagacatttgattatttttgaattacacaatcactacaatgaatatatattaaaatgtcccaattctgtcatctcaccctccttttaagactttaacatataactttcsagggttttcctgtaactttctgtggttttcctgtgcgaaatttctattacataacacgtgtacccatagaaacagtaatagttttgtcagaataaaggcattatattgacactgtataatcagatggtagtatttcagggtttattttcattccttctttctttgaacaagtatttatcaagtgtctgccatattccaggtactattttaggtgctattagtttattttggctacagtaataagttactacaaacttggtggcttaaagcaacaaagtttttctctcacagctttggaggccagagatgtgttgaagtgttagcaggggccatactccctctgggggctctaggagataatctgttattttcctcttccagcttctggtggctactctgatatccctgggcttgtggccacatcaytacaacctctgcctctgtcttcatatcatcttctctgtgggactgcattcagtctccttctgtgtccctcttataaggatacatggcaggcgtggtggctcatacctgtaatgccagcactttgggaggccagggtgggcggatcacctgaggtccggagtttgagactagcctggccaacgtggtgaaaccccatctgtaccaaaaatataaaaattagtttgatgtggtggtgcacacctgtaatcccagctacttgtgaggctgaggcaggagaattccttgaacctagaaggcggaggttgcagtaagctgagactgtgccactgtactccagcctgggtaacagagtgagatgccgtytggaaaaaaaaaaaaaaaaaaaaaaaggatacgtgtaatggcatttagggcccatgtagataatccaggataaactccctctcaagatccttagctttatatatatctgctgccacgtaggtaatattcacaggttctgggtattaggatgtgaatatatcattggaggggccattttcttgcctactacagacacttaacaccatagattagtaaataatataatatgggccaggcgtggtggcttacgcctgtaatcacctgaggtcaggagtttgagaccagcctggccaacatggggaaaccccgtctctactaaaaaatacaaaaattagctgggcgcagtgatacgtgcctatagtcccagctacttgggaggctaaggcaggagaaacgcttgaacctgggaggcagaggttgcagtgagcagaaatcatgtcactgcaccctagcctgggcaacagggcgagactctgtctcaaaaaaaaaaaaaaatgttagagagtcgtaagtgttagggagactaataggatgggttatggggggtggagaattgaagggaaagattgaagtttaaaataagatagccagatttggccttaatgagaaagagacatctggctgggtgtggtggctcatgcctggaatcccagcactttgggaggccaaggcgggcggatcacttgaggccaggagttcaagaccagtctggcccacgtggtgaaaccccgcctctactaaaaatataaaaattagctaggtgggcggatttcttgaggccaggaattcaagaccagcctggccgacatggtgaaaccccacctctactaaaaatacaaaaattagatgggtatggtggcacgtacctgtagtcctagctactcaggaggctgaggcggcaggatcacttgaaccatgaggtggaggttgcagtgagctaagattgtgccactgtactccggcctgggtgacagagacactgtytgaaaaaaaaaaaaaaaaaaaaagacatctgaacaaaggtttgaaggaggtgaggaagcgacccatgaggagatctgagggagagtgttccagaccagagcaactagtaaagtgcacagagcctgtctaacgcaggaacacatctggcctatttgacgaataggaaggaggccagtgttggaatggaaagtgcaaaagagaaagtagcaagagataaaattgggaggcaacacaagaccagatcacatagggccttataggacattgtagagattgctctttctctgaatgaaatggggaaccatttcaaggtttgagcagaagaatgacatgatctaacacatttttaaaggatcactttggctgcagttttgtgaataagctgtagggggtaagtatagtaatggggagatcaattagcaggctatatcagtcgtctaggtgggagatactcatagtttggaccagggtagttgcagttgatgtggggagaaattgtcagttttgagatatatatttgaaggtagagccatcaggatttcccgacagattggatgtggattatgagagaaagtatttttcctggcgagtggtaggatggagttacagttagctgagataaggaatatctcgagtgaagcagtttccagggagagatcaggagttcagttttgggcatattaacctttgagatgtctaataacagacatctgagtagacatgtcagttaagcagttggtataggaatgtgaagttccatggagaagtttgggctagaggtacatatttgagaatcagttcatttggatgatattgaaagccatgagactggatgaaattaccaagggagggagtgtagataaaaaaagaggtcccaggccaggtgcagtggtgtgagcctgtagtccctgctactctggaggctgaggcaggaggatctcttgagcccaggagtttgaggctgtattgtgttatgattgtgcctgtgaatagctactgcattacagcctgggcaacagaatgagactttgtctcttaaggaaaaaaaaaaaaaactcaggactaagccataaaccctgtatgattgagagctaagagagaaaaggagaaagaagaccaaaaaggagtgataagttaggctagataaccagggcagaggctatgttttggaacccaagtggagtgtttcattgaggggggaaaaaattgatcaactatgacacacactgctaacaggtcaaggacggtgaggactgaagattgactattggatttaaccacttagacatcgttggccactgagcagtttcagtggagtgatggaagcaaaagtctgattagagtgggtttaaaagaacaattctggccaggtgcagtgactcgcacctgtaatcccaacactttgggaggccaaagtgggaggattgcttaagcctaggagtttgagaccagcctgggcaacacggcaaaaccccgtctctacaaacaatatcagaattagccaggcatggtggtgtgcacctgtggtcccagctgcttgggaggctgaggcaggagaaatcacttaagcccaggaggttaaggctgcagtgagctgtaattatgccmctgcactccagcctgggtgacagaacaagaccctctctaaaaaaataaataataaaaggcataggtagtggttacatggttgtcttcactgtatgataatgctcttgagcagcacatttgtctttttctgtgtgtaggttatattttaatgaaaaggtttttagagatagaatgggagggctggagttggagacagtgaatacagataactttttgagggattttgctatatagggaagcagggaaatggatggtagctagaagaggagtctggccaacagggggacttcataaagctgggacaggtaataacatgcttctatgctgatgggaatgctccagtagagagggaaaagtagtcatattttttctcttcactttttccccttcccttcacatactttttcacttcactcaaggacgtcactcccttattctccctcagtaattctcccctgagggaagtcagaattactggaatgatgtccttgagtagacaagagacaatgtggacatagctgcaggtggtgggtagatgtgttacttggarcatgtggaaattctcttttgatcctttcagtttttttcagtgaataagaagcaaagtcatcagctgagaawgaggatgctaaagaggtataggaagtttgaaaagaagaaaatatatgaaattatagtttaggaaacagctaatgaaaggactgggggaacttagtataactgccaggaattaaggtttatttatttagaggaaaatatacttcacatggttggatatttggatgttttctccagtaatgctgaactacaggagaagagctatggaaaaastggagaggttgcttaatcagccggaagagggaggtttttctgagtgagtgtggtgtgatataagaggagaacaaggaagttgaaggcatagcaaaggaatggttagaatgattgatcatagaatttaaggtgggcaaaaacaagaggacaatgggggagagttaatagaattgtagattacagtggggtcagaggaatgttggaggtgaatgtctgctggaaagaggaggtcagaaagacgctgaaaattgrgagtattaagcaatcttggtaaagaaaatgtctaggatatgatcatgggtgtggctgaggtagggtggtgggcaagctcactggaggagagttgttcaaatctccaagtgttgaaatctccaggaattaagataagactagtgtaggtcttttggtttccaatctggcatataagaagcttggaagtcactattctgtcctaacaacaagtaaaaaactgaacaaactgaagaatcaaaactcatcttagatccataggagaagtgaggttgcatggcaaactgctgtcccccaaactggagagaccaacaagcaaatacagataatcacaacttcccagagcagaaacccaaaagtagcaacctccacaggagctggtggtggggtagggggacttgaagtcttgttgatgaattgttggaggttccgtgttaaaaactccaggtgrgcagggcacggtggctcatgcctgtaatcccagcactttgggaggccgaggtgggcagatcatttgaggccaggagtttgagaccagcctggccaacttggcgaaaccccatctgtactaaaaatacaaaaattagttgggcgtggcagcacgcacctgtagtctcagctacttgggaggctgaggcagaagaatcgcttgaatcctggagatggaggttgcagtgagccaagatcgtaccactgtactccagcctgggcgacagagtgagactctggttttttgttttttttttttgtttttgtttttgacaaaaaactccaggggtatccagtgtgaggtcccaacatttttgtgaattttaccttcaggagctcttccacatggtgaaaattagagaaaaatcacctcatgcttccgacaaggggacgggaaagggaaccattttaaaatatgccagagcattctgttcttcttaacaaggtctgatctccttcaggaggaactgtttaaccagagattaacttgtggggctttatcagagcctaactgacctgaggaaaggtaaatactcaacttcagccattctagccatcctgtcccacctaagggagagagaggaactgagaagcatgtgtaaagttcacagtctcaatatggtcttattgaggtacggtcttagtaaaagaccaagacgtcaccataggactgtagaatgcttcctttcccccaacaccttaccaccatgtaataaaggcttattgacagcacttccttttacccgtgtacatcatgttgggctatcaagaaaatattgcaagatatactaaaaggtaaaagacagtttgaagagacagagaaagcatcagaaccagactgagctggaataatcagactggaaatttaaaacaactgtgattagtatactaaggtctctaatgaataaaaagcaagcaagatgtgcaatataagcagagggctagaaatccacgaaagaaacagaaatgctagagataaaaaacattgtagcagaaatgaagtataccttttaaggacttcttagtagactggatatggccgaggaaagaatctctgagctttaggatatctcagtagaaacctccaaaactgaaaagcgaagagaaaaataaccagaaaaagaaaaaaacaacaacaacaaaaaaacctgaactgtaatataatatctaagaattgtggaacagcttctaagagtataacatgtaatgggaatactagaaggagaagagagaaaggaacagaagcaatatctgactgaggatttcccctcattaatgtcagataccaatccacagatctaggaagctgagagaacaccaaatatgagaaatgccagaagaacttcaactaggcctatcatttgcaaactacaggaaataaaaaataacaaatactgaagccagaggaaaaaatccaccatacctgtacaagagcaaagataataattagatctgatctcttttcagaaaccatgcaagcagaagagagtgtagtaaaatgtttaaagtgctgagagaaaacactyaccaatgtaggattttataccctgtgaaattatcctttaaaaatggaagagaaataaagactttctcagacaaaaattggcagaatatgtcatagacttaccttgcaagaaatgttaaaagttcttttagagagaaggaaatgatagaggtcaaaaactctggtgtatataaagcaagtgwgagcattgaagagggaatgagtgaaggtaaaataagttttatttttcttaattgatctaataggtaacagtttaaaataataacattgtattcaattacatatgctcatgtattacaattacttatgtgctcatgtataagtgaaatgaatcacaatgtaagaaacaggagataggaattaggattatyttgctattaagtggtacttgcaccacctgtgaagtagtaaagtgttatttgaaagtggacttggattagctgtaaatgaatattgcaaactctaggaccagcactaaagtaaaacaaaaatacaactaatagctaagaaaagagacaaaatgaaattatttaaaatgctcagttggtggaagacaaaaataggaaaaaagaacaagggcaacaaatagaaaaccgttacaaatatggtagatattaatccaactgtgtcagttattactttcaacatcagtagtgtaaatgcaccaattaaagataaagattgtcatagtggatgaaaaagtaagacccaactatatggtgtctacaagaaacccactttaaatataaaaatacatatacatataaagtaaatgagtggagaaagatataccatggtgatgctaattgaaagaaagcaggagtagctatattaatttcagatggagccaatttaaagttaagttttattaggtaaataaaacctgagttttaatacacttaaagttttaagttctaaaacttacattttaataaaacttaatataacttaagtttcgctgatattgggctccatattccagaaatcacagtgtaagggttaggaatatgggagattggtgcaggttagggagcatgcagagcattatggggatcagtgtatgggttatgaaggataacctttgagtttggggctyatggggacagacataatgaagggcagggtgtgattagtcctggctgactcaagatagtggtggtgaggctgtgcgtttttggaggttgttagttgtattgtctatggctccctctgtccttttcagcttgagatgaagaggcctgaggctcattcttgactcctgctggggaaggggttgttttactccaagtatagggctcattgttgactcctgttgaatgagaatagaaagtctgttaaattttatttgtgaatttgatagcaaatactggttaaaccttcatcttgttatatgaaactctttgtccagtatcttctctttatagtattacaagaggtaatattgtaaaacctttcttcaaaacttgtgaagttattacttaaaggagcattatataatgacattctaaacattatagtgtaaattttatgactgccattttgataaagcatgcagaagagttaagcccaaattaaaatctgaaatacttgggtataaaaagaagttattccttgaagctttctgtataaaatatactagtacttagaattctaaatcaatgtctttgtttacagttatcagtgaatatcctaactagctgaataatagagcttgaaaaaaatgamaaatattttttccccttagttggtgcttcccgtgctgctgttgatgctggctttgttmccaatgacatgcaakttggacagacgggaaaaatagtagcaccagtaagtattgcaataaaatatgctgtgtaaaatgttatggggataagtactgtatrtatttgttgaacagtgatctcagtgatttaccttactcagtgttcctgagcagttagccagtaccatggtgaatatgtcattttcacaaggtctgtgtagttcttgatcctagtaaaatgcccagcagttcttaaatccagcttattattcaagtattttaaagcagtggaacattttatcaaattaagtcatattacatcaaataaaacattgataaaagcagcattttatcaactcagatttataagttcacattgataagatttatttccataaagcctttagagagtataaaatcaatgagaacaatgaacctattttaatgaacagaattttgaaattgggagctgtgaatgacagttttagtcttatatcttcctgaacacctagtttctgtattttgtcttatagtatcaatttcagaaaattctgttctacatagataagtgatactagaatattcttcagttaagcctgtctaaaacttggaagagcaggaaattttggtctcaaagttgaatcacagttgataatgactgtttatatttcttaggtgatacagattttcagtgaataggagtctcagccagtttaaacttgtatagtatgcaggaaaacatgttttttatatatttcaaaacaatatgcagtcttgtccattaaaaaaaaatcttacatcccagtgctctattctatgagatattcattcacagttttaagatgctgtagtcaacattttcaaggcttattttttatttttgaagttttttttgttttgttttgttttgttttgttttgtttgagatgagtcttgctctgtcacccaggctggagtacagtggtgtaatctcggctcactgcaacctccacctcctgggttcaagcagttctctgcctcagcctcccaagtggctgggattacaggcgcccaccaccatgcctaggtaatttttttgtatttttagtagagatggggtttcatcatcttggccaggctggtcttgaactcatgaccttgtgatccacctgcctcggcctcccaaagtgctggaattacagcgtgagccaccgcacccggcctgaagtttgtttcgaagtatttgttcaagtcttttgcctgttgaaaacttgagttctttttctttttcttttctctttgtaggagttttttatataacctacatacaaattctttgtcagatgtgtgttgtatttttcccatgctaggacttcctattcattttcttttgatgagtagagatttctaattttgataacctaatgcaccagtctttcttcttatgcttaatacgttttgtgttactcaacttacttgaagtcagaaaagaagtcagaaaagaagatttaaagcttaaaatacatattagaactattcataaattaagtcacatcatcatgtggcctgtttgcttgtcataccgaattaggctgtgagagtggatttattgagcagatgagcttgagccttccttgacatttaatgagctctagcacacatgcgcatatatatatatatatatgtatatattttaagagacagggtcttgctatgttacctgggctggagtgcaggggttggtcacaggcatgatcataacacaccacagcctctaactcctagcctcaattaatcctgccacttcagcctsttgagtggctgggactgcaggtatgtgccaccatgcctgactggcacacacattatttgtggaaatctttcaattttacataagtagacatctgtaggtctgatttcataaaagatcagcagacccacaaccttcttaaccaaaaatatgtctacaagaaattcaggctgggcgcagtggctcaagcctgtaatcccagcactttgggaggctgaggcagttggatcacgaggtcaggagattgagatcatcctggctaatatggtgaaaccccgtctctactaaaaatacaaaaaattagctgggtgtggtggcatgtgcctgtagtcccagctactgtgggggttgaaacaggagaattgtttgaacccaggaggcggaggttgcagtgagccgagattgtgccactgcactccagcctgggcgacaagagcgagactgtctccaaaaaaaaaaaaaaaagaaagaaagaaattcagagatatacactgaagtgacagagacttattttgactgacagagagtgcttgtggttatcaaatagaagagcagagtggcagggagtggctggtggtatcctttcctatattgaaaataaatggcataccatcagcattattcaatattactcttatggatatagaaccatcgaaattttttttcataaggaaatatattaaatgctttgaagactttgacataaactatacagcctccgagagaattttgattcattaactcagggtgtgtgtgtgtgtgtgtgtgtgkatatacacacacatatacgcatatatgtgcatatacatatatacacacgtaatttatgtatgtacattttgttaaggatctgaaactttttttggaaactatatctcaaatttacagaaaacttacaagtagagaacaaaaaacctatatttttatgggccatttgagtaagttgctgtgatcatccccaaataggttatataggacattttcytaataactacaatacaactttttaaattaggatattaacattgatacataataccatctaagcatcagaccctgacattcaggttttgcctgttattccaaaaatgtcctttatagcaaaaggatatagtgcagagtcacatattacattttaactgtcatgtgtccttcaatcttaaatattaatagttccacagtcttaccttcacttcatgagggaattgtgaagattaccagacagctgttttatagaatgtccctcaatttggatttgtctaatgtcttcaatttagattatatatcttgaacaggaatatcacagaagtgatacctcatcctatcagatggtatacaatttcatttggtctttcatttaatgattttcactttaatcctttgattaaggcaatatgtgccaacttctccactgtaaagttacttttcccattgtaatacatattttatatggaggtactttgaaatgatgtaaatatcccagttttcctcaaactttttttttttttttttttttgagacatagtctcgctctgtcgctgaggctggrgtgcagtggtgtgatctcggctcactggaacttctgccttcagggtgcaaatgattctcatgtctcagcctcctgagtagcttggattacaggcatgcaccaacccgcccaactaatttttgtatttttagtggagactgggttttgccatattggctaggctggtctggaacccctggcctcaagtgatccgcccaccttggtctcccaaagtgctgggattacaagcatgagccactatgcccggccaataaacttttgatttattcatttgtttatatcagtatggacttatggtacctattttattcaatgggtaaaaatctatggttgtcattattattgatgtacgaattgtcccatgtttggctagtgagaggcccctctgtgtctttttgatgtgttcccatcattctttgaatccttttttacttcctgacaagacaagatgttccaggctcattttgtatttttcctgtcccatctctggaaccagtcctttctccaaggaatcctggttccttttgctgaagaaaagtatttagaagccaatatctcaatgctagttatgttcattgctattgaaatgtcactgctcccatgacatctcagtgaaaaaagctagagaatgtgtgtgggcatgtgtatgtctaggcaaatatatgcatatatatatttacctgcatatacaaacacatttacatttatatttctgtatcagttgtatatgttgaaaaccataagtgtacactggtatctccaattctagtctcataccacagggttaattttggttttctcccttttcctatttgtaatgcctttctcctatggtgagaaacctagaccctgccagtactctaccctgcacagatgccctccttgccccactcaagctccaacacctggaactgaatagtcttcctgtatagataccctccccaccctacttggactctggcatctttgtctgggtagctttttcccaaggtggttgcacaattttacactcctaccaactatgtatgtgggttctagttgctcctcattttcaccatttggtgttttagacattttggtggatgttactggttttaatttgcatttccctgcaattaatctgatgctcatctaatgatgatgagcacgttgtattattggccatttaaacatcttccttatgaagtgcctgttcaaatcttttgcccttttttagttgaattgcttgttttcattattgagttgtagacatattttatatattcctttacaagtttcttgttagatacgggttttacaaatattttctcacagtccatggcttacctatttattttcttaatggtatcaaattgaggargttcccttctgtttctgatttgctgagagttttaggaatgtgttttgaattttgtcagatgttttctgcatctgttaagatgattggatagctttttgttggggtgatcagacccaacaccaggccatgggggctacaaaatccggaggagtcaaaggaatgagaaaagacaggttaagagagaaagtgggaacagagggccaactctagtatggaggctgcaaaggccccaagctctgggaggccatgctatttattgatgatcaaacaaagaaacaggtggtgaggatgtgggggttgaaaggaagcratgtatcaagcaaatgagctacagctgtgatggtgtagcattttctttgaaacgtatggctacttgagataatgggtgtgctagaagcaaggagccagcaagtttagacatgttccaaaggccactaggtattttagaccctggaccccagacatattccaaaactcttttatattatgtcagacatgcaagccctgcctcagtttctctcccaacactcagctcttctcccaacatgccccccttttcttttttgtaaaaccrccacagctatcattgcttgttcttgacggcagctttctctccagcggtggcttccgcatctgcagactaaaaggagacagcacaagcacataattattagaacaaaatctgcaagtgtagagcttccaatggccttaatccacttaagaggattgaatgtagacaacccatcggctgtcttgttgaaaataccagttgtagggagcaggttcaagtgagcctgagaggcttcaaaaacctgctattttagttttacaatatcaagggtgagattttcatctctgccctccagatggcatttaagagtaacataacacaactttgaatccaaaaggtcctctttttgtttttgaattaattgagcaaggcaattgcaggctgtgcagctcttaattgcctgttggtgatccagcttcatttttcttagcccttattcaaaatggagtcactctggtttgaatgcctcttacatatttcctctttcccttttacaagaggacccttaattctaagggttgcagaaggatggaggtctgtcttctgtaacttcttcatgctgaataggggtgatgatattcctgcctacctgttagggtctcttgtatttagggtagaagggtagagaggaattcagtcagaaaacattggtccattaagcatctgttgtagctctgaatcccagcaaaaggtaaaatcctggcactccagcagtttctcagcttcctgtgtggttttcttgatctgtcccatgttatgggggttgatgtcagcatgactctggttggtcctcgttccgtcttcgtattcagattgacctggctcatggcttgtactgggggaacccggtccatggttgggatccatgggtccctccagtctcccgctccatggtcatacacaccttgagggcacccacacagttttttcatctcctgcaaaagtacaaacataccctcacccctacattagtaaatctactgaaacagaagcaaaggctttttttttttttttttgctgtagctgggaggcatgccattgctgaagcatttgtaactcagcttctgcctctttggttaattactgcggggtaaaagttaccattggtaatgagaagcaggctttttctgattaacagaaggcatagagaaaccaaatcgaggcttatccttcttgtgcaatagtattgcaaaaaagcaatccttaaaccttcaatttgcactgtacaggtgggtccactagatgctgtggctcatgatagatcttcagatgtttggtgggyacccacacagacacctggttgtcacctggagagacacaagcaaatcgtcttccccatataattatctttcctttttcccagctttttgtatgtgcatccctccatcatatatcttgtccagcctttttattttccttttgtcctgtcagttgttcagctgcagtcgtgggttgatctttttataaatttaaaaactttaatgttaataaagctaaatgcaattgcatttgcagtgtcttatattgctggtcccctcccttttgtatgtgagtttttaaagtaggattagctctttaagcaatgtcagtttgaaaaacttgctgttgaggtcctgcaaattaggcttttccattagtagatccatcagtaaaaacagtaatggctgctccagtgggggctttttgagtaacagaaggcagtatctaggatgttaattatagaaatggaaatatcttagatttaggataataattatcaagaatgccaacaaaaccggccaaattaacttgccattcttgcgaattaatataggcttgttgaatttgttgttttgttaatgaaactataatctgatttggatcatatcccattagctttgttgtgcgcagcctcgcttgtcctactagcacagcaatttgatttaagtacagagtgagcgttttggttgtattgtgaggtagaaaaagccactcaaccagatcatcctgttgaactataaactcctgtaggcaaatgcttagtaggaaaaactaaaaactgtaatggctgtatcagattaattcgttctacttgtgcttgctgaattttttcctcaattgatggaagttcctccaatgcttctttgaacagggagcatttactgttaaggttagaatcaccttgtaaagtagaaaagagatgagacatagtataggtaggcatgcctaaagttggatgaatccaattaatgtctcctaataatttttagaaatcatttaaggtttttaaattatctcttcaaatttgaattttttttttttttaaacggagtctcgctttgtcgcccaggctggagtgcagtggcgtgatctcagctcactgcaagctccgcctcccaggttcacgccattctgttgcctcagcctcctgagtagctgggactacaggcgcccgccaccacacccaacgaatttttttgtatttttagtagaagcggggtttcactgtgttagccaggatggtctccatctcctgacctcatgagccacccgccttggcctcccaaagtgctgggattacaggcatgagtcaccgcacccggccaaatttgaactttttgaggcttaatagcactttgttctaacttcattccttgatattgaaagggagtagaagtttggattttatcgggggctrtaattaaccctgccgcatttacagccttttctgtttgtagcacatcaattcttccctagtttcagctgcacacaaaatatcatccatgtaatggataatataacatttttttaaactgttctccaactggcttaatagctttcccgacataagtttgacaaatagtcgggctatttaatatgccttgtggcagtactttccaatgatacctgtgcactggtttgttattatttatggcgggaacagtaaaagcaaatttttcataatcttgggcagctaaaggaatggtaaaaaaagcaatcctttagatctatcactataagaggctagtattttggagtcattgttggggagggcagccctggttgtagcttgcccrtcggttgaattacagcattaacagccctcaaatctgttagcattctccatttacccgattttttcttaatgacaaatacaggagaattccaaggggagaaagtaggctctgtatgtcccttttgcaattgttcctgcaccagttattttaaagcttccagtttttcctgtttcagtggccattgctccacccaaactggtttggcagttagccaaacaagaggaatgggagccagaggctcaacaatggccactgctaaaaatgatactccaatccagtctgatctgtttgtccttctgaaggttctgattggccatttttrttttttcctagtccttctcctgagcratatcccatatttttcatcatttgtccactaatatcactatattgatccataggaatagatatttcagcaccccattgttgcaataagtctctaccccataaattgacaggaataggtgtaataataggttggattgtccctgccatcccgcccttgacatggtaaaatcaagggacttgaaaaacttctgaggcagtccctacgccaacgatacccgtggaagtcttttgtctgggcaagtgtcgaggccattgatttaaagcaataaatagagacatcagctccagtatctactagtccttcaaaatcctttctctgaatagttactatacaaataggtcttttatcagacacttgattaacccaatataaagcttttcctgctggattagtactaccaaagcctcctgttctcttcactgtgctgcttcctagttttatgtagggtagcagcaacaactgagcaattcattctcttggggaggcagaccacggagtcgaggaactaataactagttgaatctctctggtatgatcagagtcaattattcccatatgcacagtgacaccttttaaatttagactagamcttccaagtaatagactgactgttcctgagggtaagggtcccctaactcccatggggaccttctttggtggctcccyaggaaggagacaggaattgtgctgcagaggtctatggcagcactgtctgctgtggcgggggacagctgtatgtttgttaagggcactggctgtgccggatatgcctcagtttgttgaggggccgaaggcaggcccctcttcctatttcctgaaagaggttgtccatctttgctaaatttagaatggcactgatttgcccagtgattgcctttcttacaccagggacatacaccaggacttttctgttgatggatggtagtggtttttccttttgatttccatttctacattccttttttgtgtgtccaaattgcccacaattaaaccaagagcctgagaaacgggacatattctttcctactttcaatccagccatagccttagctaaaagagtagccttatgtaagttacctccaatgccatcacaagccttaatatattcagctaaatgagccttccctctcaggtgtctaatagcagtttgacactctgcattagcattatcatatgcaagaagctgtattataacatcctgagctgttttatcagttatggctttatatacagccacagcctcttggagccaagcaataaaatcaatatatggttctttaggtccttgtcagacaactgaaagaaggatatttttccccctgtaacatttaccctttcccatgcccataagcacacagagcacagctgaacaatggcaacaccctccattacttcttgattctctaatcgaccccaattagggccaactcccagtaactgttmaaaggaaacaagcacaggtgactgcacttgtgtgttttcccttgcctgagtttgagcttcctcagcccaccatgttttaaactgcaagtactgggacggagtgagaacagattttgttaaagtatcccaatcatatggtattaacctattatcaagagccacatttttcaacaaagttttcacaaaaggagagttcggttcatattgaataatggcttgcttaaattcctttaaaacttaaaaggaagagtggcccaattagctatattctgtccttcttgctgggtttgccatgcttcaaggtctccctcagctctagctttttgaatagaattttgtatagcaccaccaattgctccaggttttaatgttgcaactacaggaggagtaagtttttcagctgattcattttctcacccagtaagggggagagaggaggtggccattcacttaattcagcaggtggagctgatgggctagtaaaacatactttttttagttttcctttcttttctttaatctcctccggtagctgtttctcacactcagaatctgaagttagttttttayactcgtcctcctcttcctcatctgaatctgcctcatcatcgtttgaaatggctcaggagctacctttattagtgcccacactgaccaaatggaaactggaatttttgctctgtctttatacacctttttaaaatctcttcccrttgtctcccattcatccaactccatagtcccttgttccggaaaccatgggcaaaactgctttactgtactaaagagtgataacaaattctgagtactaactttcactcccctttgtaataaatgccttaagaaattcaaataagcaaaatgtttgctttaacttcatcccattgttaccctggttcttccaagcgctcagcttcctcaccgagcttctttcagtcgtccctgggtgtcctctgacgatgcatcctccgctttcacatgctctagcgttccttcactgtggtctttgtcgccccatgttgggtgccatgaatattggggtgatcagacccaacaccaggccatgggggctacaaagtccggyggagtcaaaggaatgrgaaaagatgaaagaaagtgggaccagggggccaacgctagtatggaggttgcaaaggccscaagctctggaagcccacactatttattggtgatcaaacaaagaaacaggtggtgaggatgtgggggttgaaaggaagtggtatatcaagcaaatgagctacagctatgatggtgtagcattttctttgaaacatatggctacttgagataaggggagtgctagaagcaaggagccagcaagtttagacatgttccaaaggccactggtgcctaccggggccgtcctgacacatctattcttaggtatagaatttcaggtatagttccccccagcacttttaagttccattgtcttctggtcttcattgtttctaatgagagctcagccattatttgtattgttcctttgtatgttttttgttgttgctttcaagattttatctttatcgtagatctttagaagtttgattatgataggccgggtgtggtgcctcatgcctgtaacccagcactttgggaggccgaggtgggcagatcaccaggtcaggagatcgagaccatcctggataacacggtgaaaccccgtctctactgaaaatacaaaaarttagccgggcatggtggcaggcgcctgtagtcccagctactcaggaggctgaggcaggagaatggcatgaacccaggaggtggagcttgcagtgagccgagattgcaccactgcattccagcctgggtgacagagcgagacaccttctcaaaaaaaaaaaaaaaaaaaaaaaaaagggggtttgattatggtatacctagkggtgtgtctttttgtatttaacctgcttcagatarcaagcttcttaaatctataaatgtatgccttttaccacatttgggacgttttatgttactattttttctgcttcatttttttttcctcacttttgttctgggactctagttacacatgttttagatatcttgatgttctttcccagattgctggagttctgttgattctttttcctcttttttttccctactctatagcttggatcatttcttttggtccattttcagggtcactgactcttgtataattttaatatgcttttaaacctatccagggactttcttattctaggctttatattttttagtttgagatttgcatttagttgtttttaaaatttttatttctctaatttcttatctgtttgaccattacagatattttactttacatccttgcgcataggtatagtacctactttaaaatccttgtgtgctaattccaaaatctggatcatttcaggactggtctcctaggctcaagcgatccacctatcttggcctctcaaagtgctggggttacaggtgtgaaccactgcacctggcctgagtgaatattttaccactttataatattatgcattgttcatttagaaaataatggtttactgagttatgaagatcttccaaatgttgacacatttgtcgatataaaaagtcacattcagccctcctccctcctcactcgtgggccgggcctggcatggtatggcatcaccacagatggtgctgaggcacagcatggggcggctggggctcctgctgctgccgccacagcagctggggctgctgctggcggctctgacttctctgctgctcccagagtccgcagctgcaggcaggtctgaagctcgtgggagtcccggcaaagctgacagtgtcccaggggcagctggtaaagctcagctgcagcatggaggggatggaggagcctgacatccagtgggtgaaggatgggtctgtggtccagaactggttcatcccagtcagcgagcagcactggatcggcttcctcagcctgaagtcagtggagcgctctgacacgggccagtactggtgcaaggtggatgggggcgaaacccagatctcccagccagtgtggctcacggtagtaggtgtgccacttttcacagtggagccaaaagatctggcagtgccacccaatgcccctttccaactgtcttgcaaggctgtgggtccccctgaacctgttaccattgtctggtggagaggaactacgaagatcgggggacctgctccctctccatttgttttaaatgtaacaggggtgacccagagcacccatgttttcctgtgaagttcacagcctaaaatgcctggcctcttctcgcatagccactgttctccttcaagcactgcctgcagtccccttcaacatcaccgtgacaaagctttccagcggcaacactagtgtggcctggatgccaggtgctgatggccgagccctgctgcagtcctgtacagttcaggtgacacaggccccaggaggctgggaagtcctggctgttgtggtccttgtgcccccctttacctgcctgctccgggacctggtgcctgccaccagctacagcctcagggtgtgctgtgccaatgctttggggccctctccttatgctgactgggtgccctttcagaccaagggtctagccccagccagcgctccccaaaacctccatgccatccacacagattcaggcctcatcttggagtgggaagaagtgatccccgagggccctttggaaggccccctgggaccctataaactgtcctgggtttaagacaatggaacccaggatgagctgacaatggaggggaccagggccaatttgacaggctgggatccccaaaagggcctgatcgtacgtgtgtgtgtctccagtgcagttggctgtggaccctggagtcagccactggtggtctcttctcatgaccatgcaggccagaagggccctcctcacagccgcacatcctgggtacctgtggtccttggtgtgctaacggccctggtgacggctgctgccctggccctcatcttgcttcaaaagagaccgaaagagacgtggtttgggcaaggctttgacagtgtcatttcccggggagagccagccattcacttctgggcagccyggtccttcaatcaagaaaggcccaagtgcatcgaggccacattggaaagcttgggcatcaacagcgaactaaaggaaaaactggaggatgtgctcatcccagagcagcagttcaccctggctggatatagggcaaaggagagtttggttcagtgcggtaggcccagctgaagcaggaggatggctcctttgtgaaagtggctatgaagatgctgaaagctgatctcattgcctcaagtgacattgaagagttcctcaggaaagcagcttgcatgaaggagtttgaccatccacatgtggccaaacttgttggggtaagcctctgagcctctggagcagggctaaaggctgtcaccccatccccgtggtcatcttgcccttcatgaagcatggggacctgcacgccttcctgctcacctcctggcttggggagaacccctttaccctgatccggttcatggtggacattgcctgcagcatggagtacctgagctctcggaacttcatccaccgagacctggccgctcggaactgcatgctggcaggggacatgaccgtgtgtgtggctgactttggactctcctggaagatctacagcggggctactattgttagggctgtgcctccaaattgcccgtcaagtggctggccctggagagcctggctgacaacctgtatactgtgcacagtgatgtgtgggccttcggggtgaccatgtgggagatcatgacacgtgggcagacaccatacgctggyatcgaaaacactgagatttacaactacctcattggcgggaatcacctgaaacagcttccagagtgtatggaggacgttcttacactcccactccatccaagccaaggtctccttaggccttcagacgaccttttgtatgatctcatgtaccagtgctggagtgctgaccccaagcagcgcccaagctttacttgtctgcgaatggaactggagaacattctgggccagctgtctgtgctatccgccagccaggaccccttatacatcaacatcgagagagccaaggagcccactgtgggaggcagcctggagctgcctagcggggatcagccctacagtggatctggggatggcagtggcatggggacagtgggtggcactcccagtgaatgttgatacatcctcacccctggagggctggctgagcagccagggcaggcagagcaccagccagagagtcccctcaatgagacacagaggcttttgctgctgcagcaagggctactgccacacaatagctgttagctcacaggcagagggcatcagggcaatttggctggctctgatggccactgtgctggctgacaaagccctgtctgacctcagcccagacagcaaggtgtggaggctcctgtggtagtcctcccaagctgtgctgggaagcctggactgaccaaatcacccaatcccagttcctcctgcaaccactctgtggccagcctggcatcagtttaggccttggcttaatggaagtgggccagtcctggttgtctgaacccagacagctggcaggagcagagtgattatgtttccatggttaccatgggtgtggatggcagtggggggtccaggtccagccctgtaggctctaccgtcccrctgagctgctcctgctgcttaagtgcatgcattgrgctgcctccagcctgagggcccagctgttaccaccctcggggtttaaatatccaggtttgcccctccaagtcacaaagagatgttcttgtaatattcccttttaggtaagggttggtaaggggtgggtatctcaggtctgaatcttcatcacttttctgattccgtaccctgtctaggccaggagaagttgaggggaggatgcttccctgcagctgaccgggtcacacaaaggaatgctggagcacccaggctataaggtgtccctcttccaaaggcagcgtgctgagccagcaagaggaaggggtgctatgaggcttgcccaagagcgagtgaggctggagaggagttcaggagcccctctccatgcccacaatctgagcatgctaccaaatttcaaaatatctttatttatttatttatttatttattattatactttaagttttagggtacatgtgcacaatgtgcaatttagttacatatgtatacatgtgccatgctggtgtgctgcacccgttaactcgtcatttagcattaggtatatctcctaatgctaaccctccccccctccccccaccccacaacggtccccacagtgtgatgttccccttcctgtgtccatgtgttctcattgtttgattcccacctatgagtgagaacatgcgttgtttggtttttttgtccttgcgataatttactgagaatgatgatttccaatttcatccatgtccctacaaaggacatgaactcatcattttttatggctgcatagtattccatggtgtatatgtgccacattttcttaatccagtctatcattgttggacatttgggttggttccaagtcttttctattgtgaatagtgctgcaataaayatacgtgtgcatgtgtctttatagcagcatgatttatagtcctttgggtatatacccagtaatgggatggctgggtcaaatggtatttctagttctagatccctgaggaatcgccacactgacttccacaatggttgaactagtttacagtcccaccaacattgtaaaagtgttcctctttctccacatcctctccagcacctgttgtttcctgactttttaatgattgccattctaactggtgtgaggtggtatctcattgtggttttgatttgcatttctctgatggccagtgatgatgagcattttttcatgtgtcttttggctgcataaatgtcttcttttgagaagttctgttccgaacagacacttctcaaaatatcttaagactaacaaaggcagctgtgtctgagcccaacccttctaaatggtgaactttagtgccaacttcccctctaactggacagccttttctgtcccaagtctccagagagaaatcaggcctgatgagggggagtccctggaacctggrccccagccttggtgggggaacctctggaatgcatggggcgggtcctaactgttagggacatttccaagctgttagttgctgtttaaaacaaataaaattgaagacttaaaaaagaaagtcacgttcgttaatataggcatgcatcacttaacaatagggatatattctgagaaatgtgtcattaggcgattttgttattgtgtaagcatcatagagtgtacttacacaaacctagatggcatagtctactaaacacctaggctatatggggtagcctattgctgctaggctacaaacctgtatagtatgttactgtactcaatactgtagacaattgtaaaatagtatttgtgtatctaaacataaaaagttaatatgttgtgctatgatgttacaatgtctatgacatcactgaggtgataggaatttttcagattcattataattttatgggaccacccttatatatgcagtgtaatgttgaccaaaaactgttgttatgtggtgcatcactcatcttgttcatcttgttagaagaatcttcaaagctcatagtcatcggtacaagtgttttagaattttgattttcacttaaaagttcaaattttgtccttgataagaaatactatcagttgttatctcaraattgatgaggtcactttattcacagtaagatatctgcgaaaaatgcaaatgcctgtcagattttctttgaagtaaaaattgtgtttcatgaaaaaagtacctggttcagcttgcaactcaaactattaaacaagtgctttccctcgagacaacccattgtactttggtatgaagtggaagtgctttctacattcttcacagtttgtcacacagaatattaaatatacatgtaatccaaggtcaagatttaataaggttaatmtttttttttttttttttttttccttgagacggagtctcactcttattgcccaggctggagtgcagtggcaccatcttggctcactgcaacctccacctcccgggttcaagtgattctggtgcctcagcctcctgagtagctgggattacaggtgtgaaccactatgcctggctaatttttgtatttttagtggagataaggtttcaccatgttggccaggctgatctcaaactcctgaccttaagtgatccacctgccttggcctcccaaagtgctgggattacaggtgtgagccaccgtgctctgccaaggttaataattcttactgctttatcaaggaccttaggtgaaagtggctttaaaaaaaaaaaamaacaaaaaactgtgagtatgtggccatgaagaatgcagtgagtttggtgccactgacttgaaactaccactaaggcagtgttacccaccatcattttcacatcatcagtgcaaatgtcaatttggtttttccagaataaaccatgggattccaaaaagctatttaaccttttgagtatttcatcaccacttgtgttcattgccaaggattcatgtaaaaatattcttcagtgattccttgatatcaatactggacaatagaagtaaagcaggaaacacagtcatgtctacagacttgtcaggcaraagtataattttgcagatgaaatattatcttcatattcatgtttacagctaaatattttattcagcaagttacgtaccactggaatgtgacagtgccatgatttgttttcctgatttttcaaagcaggaattcagcaatgtcacctttattagtctctcagcaactatacttctctaaccaatgaaatatgataacttaagattcttcagtgactttttcttttctagcttgaaaagctaaaataacagcttttggctcttaaactcatgtcatttatgttaaaataaaatccagtttagttttctctcaactctgaatgtttgttttgaaaatagtcatcacttcctttgcataagatagagtaaggtaaattattagcatctgtaaacctaagagaaagataactttttcatatatttatttcacacagtattttttagagtatatttctcttttccataagttagagaactctgttatcggtttcatctttttcagcatctttagacatggttgttgctgcagtgggttgagaaagttagtcttctctatttcagtataaatattatcaaaatagaatagttttagagaaatttaaaaatgaataaaagtttaaaaaaatgtaaatgttattgccatgtaagacaacagtgtatttcttgtgtttccttgcaggcacaaggaaacctttagtatttcaaacattggtttattgaacaataatgaaattatagaaattatagcagttttaactgtaagaacacacactgctgtactgtcctgagaacaaactaagttaatccctatatacacacaaatttatacctaaaatcaactaccttaaaaacttttaggaaacataaaaatacagatgcatacattctattagccatcagagtgatggtttctttaaaagtcttggcacctctgggaaactccattgcgcactgtgagagaatgaaagaaaaaaacggtaaataacatcttagtattactatgaaaataggtttgaytttgcagaatccctgaaagggtcttggggctctcggggttatcctgaccatattttgagaattgctggttgtctaatagttttgtaatatattgtacagacactgaatacgttgtagagattatggattctgttatattcctattaagaatattaactttgtgttttagcaggcagttaacttggctgaactcaaattccagactcaatctccttatgttcagttcttttagtcttagcctggcagcctagagctcacctcatacatgcctaatgcgggggtcagccagagttttgagtggagtgtatgtacagagtttgtggttctccctctgtggttctctccttctggaatttttccctcactttccagctggtttggcagtcacgaatactgtcttttgtgtgtttcctcaaccaaaaagactgcaggtttctatccagagtatctcctttcggattggcttttatccctgtggggaatctgcaaatgccccaagggaggaaatggagatatatgctgggctcatttcaatgtgcctccctcccttacaggattctgcctccttcagtgctgcctgcctaagttgatctccattgtacttaaacagttgctatctgtgttttaaccagattttgtagttgttctcagcaggaggattggtctgatacaagctattcccttagggccataagccaagagtcctgaggcccagaattgaatgcattacttcacttgtgctctgactagtgcagagttggattattatctccctaaataatattttaattaatgctacttaataatgcattaggtttttggcagccatatcctactgttggcaagaattacacttgtggccatccaaaatctctcccctcccccacttgaattgcctgctattaaaccacrtctcctttgtctaggaataattcagtatttctttgtttttaaagctgaacgcagtattttcatttattcttatttaatttgggtctgttttctctaccattgaagcctcttgaatcttttaaagcttgatttcgttttctactttcctttcaactttatattgtttgaaaatcctcycattttttgccactttgaatagctatggaaagcatcatcagcactgctctttctgatgatcaatagtaataagttccctacttcataaagtaaggggacacaaagtctgatttggttatcctcacaaaataatattttattaatttgaaaaaaatatgtaatactcaaaggatgccgtgaattttgttatttttttaaatgcttttttgggtcattcacaataatttacatatgaatatgaaagattatggaacaattcctagtatgcttatggattcatgctctctgcaagaattcagacccagtgataggaaaacactagtcagttcatagcttactattgtaacaaagacttcttctcctctttattttttattttgaaatgatttcagacttacgaaaagttgaaaattaaaagcagtacagctgagcaccgtggtgtacgtctgtagtcccggctattcaggagactgaggtgggaggattgcttgaggccagcagttagagactgtagtacactatgatcatacctatcaacagccactgcactccagcttgcataatgcagcaagaccccatctctttaaaaaaaaaaaaaaaaaaaagtactctgtgtgtgtgtgtgtatacacatacattttttctgaactagttgatagtaacatttatagccctttacccctaaagacctcagtatgtatttcctaagaatagaaatattctcttatataaccaaaacacatttatataccatatcccaattttgtcagttcatattctgattccaattttttattttctaatggaatactccagttttatcagttagcctaatacagaatccactttagggccaagtattgcgtttagttgtcatctctttagtcttaagttatatggttgtggtaagggatggttcttggttcttatttagtctcagtcttaggcagatcctctgcacttgggcctcagagtgaggctttctcagtgttcttgcccctgccccctgcatctctacctatggcagccaaagtctgctttatctgtagtgatggtagcagtttgagtcatcctgagaaaattcaggtgaaagataaaggctagaaagataggctgaaacgaggtgagagtgtgtaaataaaaattctggctgtgtgaggtggctcatgcctataatcccagcactggaggctgagttgtagaatgtacaataagtttacctgtgaagtagaaggaaacccaggagttcaagggtgcagtgagccgtagttgtgacgctacactccagcctgggtgacagagtgagaccctgtctctaattatataaaaataaagtcaccttaataaaaaagattctatatggtcctgtccatttgctagatgtgggctgcaaatttggtttttagaagccaattcatattgggaaacaagatcagtgccctgaggtacagtgtcccaacgtaaaaacaaactaatggcacatgggaagtatcatttggcctggtatcaagatcagagagagagatatatcccttgagtccttataaagaaggctctattgattgacatcctcaacaatacctttactgtaaataagacagtggtttcataggactgcgtttttaataatgtccctcagtgtacactaattgcctaatattaagtgcattttcgtgagaggcagaaattatgtgatttcgtatctgctgttcaggcttattctagggtagtgactagtgatctagttgtagaacccttcttcaaaggaaattttatcaggaagccccatgtataatatgggaaaaagtggagttgaagtggggtggtatatctagagtgctactagctcagctctcgccctttctcattttcctgagacagtctgtactacacctgtgcrgaatgactagcgccctgagcacattatcagaackactgtccagagaaaattgttgaattgcatagccccagatctctacaaatgtgtctatgggaactgaattctgatttttgtcgtctattagtatttcaactactttattttaaattgtcaccccttttaaaaccccttatttagtatcattatcttactctcagaaactgaccattccttctacttcacaagtaaacttactgtactttctacataagcaaagcaatacaaacaaaaatccagcttatctacatgtggataaaaaaagagggcctccctttttaattttgctaatatgtctgcttttcctctggaccccatcattttgtaccttctttgagacagtgttccattagttaccccatcctccgagtcagagtctctcctctattggccccttttctatagtcttaaaaagaaaaccctttatctgcccagcagcttcttttcctcattacctactgcccctttcacctctcttgctaggctaagcttgaaaatgtagcttatattcgctgtattccttttccttcccattcttttctttttatttaaaagtttatatataaatttatgaaaatataaatatatatacaatttacatagaaataataaacactaatgttttcatccctgaatttaagaaacaatattacagtactgttgaaaacccttgtgtactcttcctttaatacacattttttcctcccctcaaaagtaaccattactggctgggcatggtgggtggctcacacctgtaatcccagcactttgggaggctgcagcaggaggatcatgtgagctcaggaatttgggaccaggctgggcaacatagcgagacctcctttctactttaaaaaaaaaaaaaatttagttgggtgtggtggcatgtagctgtagtcccagctactcaggaggctgaggtgggaggatcacttgagccagggagatcaaggctgcagtgagctatgattgtgccactgcactccagcctgatcaacagagcaagaaaaaaaaggaaaaaagtagccattatcctaaatttgattactattgtttcaagacatttcatttttactttactacatatctacagatccctaagcagtatatagctgagatttttcaatatgaatatgatgaatgatttagaggcataccagatgttgatcctctcagcctttggaacagtggattttatgaccagccttgttcgtgtaccatacaaatgttatcttctgtgtgccatggtataaaaaagttggggagcactgatatataatattattgtgtatatttttgaaattatcattagtaatgtcctatatatgttctttatcttttttttcaatccatcttacatttgtgaggttcatctttgttaatgcaggtagcatttttttcatttgtatttcatttatgtatggtattctattatatgaatttatcacactttacctattttcttattaatggttgtttatttaagtagttataatttcttgcttacaaataatgttaccatgaagattattaataatgtttacttgtatgttagtgttttactagagaaatatgccttggggtgaaattgctaattgtagagaatctagctttaccagattttgacaaattgttttccaaagtggttattccagcttatatttaccaacagttttaacagctctctgaactttgcttatttacagttttaaaaaaacttttgcagttcttgagataggcggtagttctgaagatgggtggtgatggttgcataacaaggtaactgtacttagtttcccagaactatatattttaaaatgattactgggccgggcatggtggctcacacctgtaatcccagcactttgggaggccgaggcgggcggatcacaaggtcaggagattgagaccatcttggctaacacagtgaaaccccgtctctactaaaaataccaaaaattagctgggcgtggtggcgggcgcctgtagtcccagctactcgggaggctgaggcaggagaatggcatgaacccgggaggcggagcttgcagtgagccgagatcgcgccactgcactccagcctgggcgacagaacgagactccatctaaaaaaaaaaaaaaaaaaaaaaaagattaccatggactgggcgtggtggttcacgcctgtaatcccagcactttgggaggccgaggtgcaaggatcacctgaggttgggagttcaagagcagcctgaccaacacggagaaaccccatctctactaaaaatacaaaattagccaggcgtggcggcacatgcctgtaatcctagttacttgggaggctaaggcaggagaatcatttgaacctgggaggtggaggttgtggtgagccaagatcacgccattgcactccagcctgggcaacaagagagaaactccgtctcaaaaaaaaaaaaaaaattactatggtaaattttatgttatatatattttagcacaattttaaaaaagctttgctggcctgatgggaatgaaatctcactgtgctttttatctgcttttctgtgattactagtgagatatctttacatatgcggaatatccatttatggtttttttccctttgaatatttaatgttaataccatttgctcatttttctattaagttatctttttcttactgattcttggaattttttttttttattttttgagacagggtctcactgtgttgcccaggctggagtggagtggtgcaatctcggctcactgcagcctctacctcctgggttcaaacaattctcccacctcagcctcctgagtagctgrgactacaggtgccctccaccatacctggctaatttttgtatattttttgtggagatggggtttcaccatgttggccaggctgattcttggaagttctttatgtattctggatacacatcttttgttggttatgtgtgttgcatacattttctttcatttatgtctgtcttttccattttaaaaaataataccttttgatagagcattaattttaatgtggttcaacttatttttttcctttttgatatgtattttttgtgtcttatttaagaaatcattcctaagttagggttgtaaagatattcacctgtatttttttctaaaagttttaaaaattttgtccttcacattttggtttataattataatctacttgatttgatttttatgtttaatgtgaagtgagtattccattttccccccatgtagttaatcaggtacctcagcaccatttattacacattccctctctcctccactaatgcacagcatcatcttttacatatcaagtttatatgtatgcaggggtctatttctgggccatctattctgtcccattggccagttgtttattactgtacccctactacacttaagctttataataaagttatctggttgggcagtatctcccttctcagttctccaaaatgtttttagctgttggttccctgcgttactttacagttttagaattcatttgttaagcttcacagttgaaatattgatcggaaatgtaggtataactcattatccagatgtagactattactaaaattgtatagatactaaagcttcagagaactcagacctatattttattatcttaatagggagaattaataactggttcacagtctattcaaaacttcaaataattttccctcaattacaaaatcttaaaacacttttataagaatcccagttcatgtaaaaatctgcattatgcatgtaaaacaccagttacttaacacttattacactcattatttggtatgtttttggacagaatagtgtggaaactgtacagtatcagttatttcttctacactgctccaaacacgtaccataatgtaaataagcaatgagaaaatatgttaaagatacatgatgaatgcaaataactcttagtgaataaccaagaccacgtaaaaaaaaatgtactgattaaagagttgcctgagttagatttggtggtgagaagtgggagaaggggctgttatcatggttgcggttcagtggtgagtcaaaatgtatggaaasattctagcaaaggagcttactattggatcctaagaagtgatggacagttttctccactcctgaggtccagaaatagatggctgtgaaccattgtctgcagtcttagatgaaaaaaaatctaaaaaaatgtatgtctccttgtgttccttttgctcgtggttatagaatgtgagcataagatatggtcctgtcaggaaaatagctgagatacagctgctgagtagactggatggtctctcttagattcataagcaccttaaatgtgcactcctacaaatccttgatagttgtttttttaaatttgaatagtgactcctgggtttaaaaagtacatattgtaacaaataytcagatagcgaaaattcttcaagtgaggaacattggatgtatagattaatttggaaagagtcaaaatctttgcaacatttgatcttctatctgtgaccatgattttatttctccacttgtttaggcagtttcataatttttgttataaaagtatgtagatatataggaatgcaattgatatttatatactgctcttactaatttatctgtagattttcttggatgttgtacatacacagacatatcttctgggaataatgaataatgaaattttgcttcatctttttatttaattttcttttcttttttttttttgagacggagtcttggctccgtagcccaggctggagtgcagtggcatgatctcggctcactgcaagctccacctcccgggttcatgccattctcctgcctcagcctcccgagtagctgggactacaggtgcctgccaccacgcccggctaattttttttgtatttttagtagagacaggatttcaccatgttagccagaatggtctcaatctcctgacctcgtgatctgcctgcctcagcctcccaaagtgctgggattacaggtgtgagccaccgtgcccaaccaattttcttttcttattgtgttagctgtggcattgttgaacggaagtggtgaggataaacatccttgtccttcatttcaaggaaattactccattgtttcaccataggtattatgttggctgtctgtttttagtggataccctttatcagattttaaaaagttccctacaataggcagtgtcatagaatagttaagaatccagactttctagccaggttgccaggattcagcccttggtgttgccacttgctggctgtgtgactttggacaaatcacttaacccctctgtagcacagttttctcaactatacaatggtgataataataattcatacttcatactgtagtattaaagattaaatgattttaaagattaatatgtaaaacaggcttaaatgagttaatatttatataacacttaaaaactgtgcctggtatatagtaagtgctgtgtattagccatttttacagtactgtcataaatccttgttttctaagagattttgttttattttgttttgaaattatgaacaggtattgaattcttatttctttacctgaggtttgacacacttactggattttgttagcacattaatatttgttgaacttaatagagtctcagatttacgctacaactagcatttaatttctatggccttttaaaggttggcgtatttggtggtagtttccatttaatacttatttctagattgccttctattagcttttttgatggtgctgaccttaccttcctaaccacctgaacatataagcatattgcaattattaaagaatctgttttctaatgccagggaaatgtgttcttacgcttagtgcaacttcttagtgggagtagattattttgtgtatattttggtattttactaacagaccaactgtccattcataatggtgagactaagtgaatagaagtcagtttaaagttaccaggtgaataagcagtttttgaaaaatgtatcaagataataaattttgtttctgggttctcttttgaaaattcactattgttgaaaagtctgtgtaggaacaaactttatagacttacttgtatacagctaggactgaatttatgggctgcctttctaacttgctaaaaagctgaagattgacagctgctttcatagtgctttatctagcttggcttttaactccaagagaactgtgttcacaaattgatgctctgttcctttggggttggtatagaagcattaaattgtactaaaatattcatatgtgagtgcatttagctgaaagcaattgatgttttgttcccaagaggacagagagaaatgctgtatggacctgtactccagaaaaaaccctaagcatgcttcttaaaggtaattacatggcctggattatcaaagcccatacagtgaagtttaaaacgacaaagaagaagttgtagaatttataaactgtggtttgtatatataaattatttggttgtacaatagttaaaaacttaattgccaaaaaactaggagttttaattatatctttggtttgtcttctcagctaatttttactagactgattgctctaaacatttattccagaggtccaatatcagtgaagttctttatccattatcattttattatataaagttaaaaattgtaagtttcagagagtgttgaattcctttttacatatatatggtaactgtttaaaagcatgccaccaataatgataaattgacatgtcttgtagatagtgaatctaatttaacagctgacatgaaaatcaataagagtagacagcagtctttgtcgtagctgtgttggtgtggtaacttgaaagaaataaaactattctaaatttctattcttattctatgtaattttgttttttttttttcctataaaaaccaatgtattttctcatatagtttcaggtatgataaatgggcacatgaatgtcaaagaacatgagacactttactagaaaatgttgattcaatggataattggtcatttagcatatgtaattcagtactgtgttcacctcaaggccaaagatacaagcactgaggtgtagagaagaagagtttaataacatcgtttaactatatattaatattaaccaaacttagtctgaaaggaaatttgggaaatagtatttgagacaggagggtatactccacttccttaaagtgagattattttagaggatcttaggttgtatagtaaatttatttttaactggcattactattttccatattacaagctctactccaattcttacaattttagaaggtgcttaaatgagtttttcataagtctttggtctgaacttcacaactcagatagctttctcttaaataaacattttgagggctggatgtggtggctcacgcctgtaatcccagaactttgggaggctgaggcgggcaaatcacccgaggttggcagttcgagaccagcctgaccaacatggagaaactccatttctcctaaaaatacaaaattagctgggagtggtggcacatgctgtaatcccagctacttgggaggctgaggcacragaattgcttgaacctgggaggcagaggttgcggtgagctgagatcgcaccatcgcactccagcctgggcaacaagagtgaaactctgtctcaaaaaaactaataataataacaataataataataattttgagaacggttttggattttaagaaaaaaactttgttttttttttgtttgtttgtttttgtttttttgagacagagtcttgctctgtcgctcaggccagagtgcagcagcatgatctgggctcactgcaacctctgcctcccaggttcaagtgattcccctgccttagcctacctagtagctgggattgcaggtgtgtaccaccacgcccggctaattgttgtatttttagcagaggcggggtttcgccacgttggccaggctggtctcaaactcctgacctcgttgtgatccacccgcctcggcctcccaaagtgctaggattactggcgtgagctactgcgcctggcctgaatttaaagtaaaattttgaagacagtacagtgaatttctataaatcctatacctggttttccttattatttttaatgtaaataatttttaataattaccacaagattctaraatgaagttttttaaacatgggaaattctgtgatggtttctgtcaaggtttctagtgattttttttattgtggtaaaatataaaatttgccgttttaacgattttttttctttttcttttcttttttttttgagatggagtctcactctactgcccaggccggagtgcagtggtgccatctcgggttcaagcaattctcctgcctcagcctcccaagtagctgagactacaggcatgtgccaccaagcctaactaatttttgaattttcatagaaacagtgtttcaccatgttgacagtctggtcttgaactcctggcctgaagtgatccacccaccttgtcctcccaaagtgctgggattataagtgtgaagcaccacacccagttgttttaacgatttttaagtgtacaatttaatgacttcaaccacattcacaacgtgcagccatcactactctatttctgaaagttttcatcaccccaaatagaaatcctgtacccattaagcaataacttattacgttctaccttggccccttgtaattgctaatctatttctgtctctatgaatttgcctattctagatatttcataaagttgaatcaaacaatatttgtccttttatgatggcttttttcatttagcacattttcacatttcatcatattgtatcatgtatcagaacttaattcctttttatggtccagtcatctgtaaacattttgcttatccattcatctgtcaatgggtacttaggttgttttatttcaccttttagctatagtgaataatgctgctatgaacattcacatgcaagtatctgtttgagtccctcttgtcagttcttttgaatatatacttaggattggaattgctgagacatatggtagttctatgtgtaactttttgaggaaccttcaaattggtttcctctggttgctttgtagctctcataaacttcttgacatagaagttatgattaaatgtcaagaaaagctatgtgtaagcaatggccagctcttagtgatttgggaaaggaggcagtttggtgaatggaaagaatactacttggaagtcaggagacctaggtttgggtggcagctctgtttcccagggccttgatttttatcattgatgaaataaagagatcgcatagataatttcaaaggttccttacaactccaaaattctacgtagaaatgtataatttagcatgttttgacttggatcaattaaagaactttgctgataaaaaattttgatagttggccaggcgaagtggctcacgcctgtaatcccagcactttgggaggccaaggcggggggatcccgaggtcaagagatcgagaccatcctcaccaacatggtgaaaccttgtctctactaaaaatacaaaaattagccgggcgtggtggcgcacacctgtagtcccagctactcagcaggctgaagcatgagactcacttgaacccaggaggcggaggttgcagtgagccgagatcgtgccattgcactccagcctgggcgacagagcgagactccatctcaaaaaaaaaaaatttgatagtcaaataaacttttttttttttttttttttttttgaaaaggagtctcgctctggcgcccaggctggagggcattggcccgatctcggctcactggaacctccgcctcctgggttcaagggaggctcatgcttcagcccgctgagttgccgggactacaggggggcgccccctcgcccgggtggtttttgcgtttttagtcgggactcggtttcaccttgttggtgaggatggtcttgatctgttggccgcattacaccgccggggggatgattgcagatccgccggtcctctggccggcgtcgcccttcggccctccggtttcgcttggcggcatctccttgttcccttccgccttacgcgtccgccccgcgggctctttccccgtccgtgtggtgcctccttcctggcccttttcctccccccccgcgcacaataaaannnnnnnnnnnnnnnnnnnnctcccgagtagctgggacttacaggggcccgccccccatgcctggctaatttttgtattttttagtagagacagagtttcaccgtgttggccaggatggtctggatctcctgacctcgtgatccgcctgcctcagcctcccaaagtgcttggattacaagtgtgagccactgcgcccagccaaataaactttttttgagacagggtctcactctattagctaagctggagtggagtggtgccatcacatctcactgcagcttcaacctcctgggctcaagtgatcctcctgcttcagcctyccaagtagctgggatcacagatgtgtcccaccacacccagctaatttgttttttattttttgtagagatggggtcttgctgtgttgcctaggctggtctcaaactcctggcctcaagcgatcctcccacctcgacctcccaaagtgctaggattacaggcatgagccactgcacccagccttcaaataaagtttttatttgacctgctaaaatgcaaagctttgtaatagacttgattacatgttcaagtattttgatatcatagacacaaatatttcaatgtaaattaactgtctgaatagttttaggtaagtatataataatatacttggcttttcataatttcaggtacacttaaagtgtattttcccacaatggaaaatctctgaactggtatagaagcaaattaggtaaatgcaaagcatttaattataaaattgttaaatataaaaattatatttaatttattattattaatatttttagaggtggggtcttattctgttgctcaggctggagtatggcaacatgagaccatagttcactgcagcctcaaatttctggactcaagaaatcctcctgcctcagcttcccaagtagttgggattatagacgtgagccactgagcacagctgaagttatatttgaatgtgaaactattctcttaagaaaaaaaaaacttgtttcaggtcctatacatcttgcataattgaaatctacaattagaaaacattgaaaggccaagggttgaaatttcactttttttctgatttacatttaaatttttgaattgtgtttcacaatatagttaatgtccttgttttaaaaaaattcttttaactttgtagttgagcaactgggttattaaatttacattttgaacaaaaaatgtgasgtacataatgaagtgtgtgctagtgatatacatcccacctgctctggacatattagactagatgtgaagaagacatttgcttagttccctatatgtcctgggagaaaaggtaggctgattaaaagaatatggaggagcttatatctaagaatgaatttgaatttaagatttcaaagaatctttgactacatattctatcactaaaaagaaccaagtccatctactgagccatggaatctccattcatgtgaaaaatcttcagaggctagataagggcccctgcttttcttccaaatgcattttctggctttgcctctagacatttccctttagcagttatttggaaccagatattgacttcactgaaagccagatcaaaatctttagctggaaagtattaattttcagtgcaggttacataaattaaaagaaagaaacatcatcaacaacaacaacaaaaataatttcggagccttgcctcttttgtgagtcagtctccttgaagggcttccarctggtgcatgtgtgtggtgggtgtgcattagaggctttctaattgacatgcaagtggttgatagagcaataaatctaaacagtgtagcttgtcattattcatgataaggagacacagagctaatgtacaaactgatacttttagcaacatggagtaaaagctaatgttagctaaaattgacaatactttttttttttttttttaatatgtacaaacttcagttggctcttcaccaggtctcatcttgttttagggatctttctctaagataaatatactttgtggacttttaacagactggtgacttcagctaaagcatattaccaatacagtaataatattgagtcatatgtggtatagaaaaagtgctgaatttagaatcaacctaggttaagaagcctgccttttgagagtagaatggtggcttccaggggctgggaggtgggggaaatggggagatgttggtcaaaggatacaaaatttgttatgctggatgaataaattctggggatctattgtacagaatggtgactatagttaataagagtggattgtatacttaagatttgctaagagagtaaattttaagtgttctcaccacaaaaagtaattgtgatgtgatagatatgttaattagcctgattgtggtaattatttcataatgtttacytatatcaaaacatcacattgtatactttaaatatatataatttttatgtgtcaaatatacctcagtaaagctggggagggagaacctgccttttactaggtgtgtataattttggacaactcagcaagcctgcctgagackctgctttctcttctataaaataggaatcatttctaccctatagagttgttgtcatagttaaatgaggtcrtgtgtataaagtacagcatagttactggcgtaacatagacagtacatatagctgtgatgactagtgtgttgtcttgaattctaataaaacaggagctaatcttagtaaaggggtgttgtctcatggatgggatataatttcagcttcaaaccaagagtatgggtaaaatcttcccttcatgtgaaactcagtttagccagaatcccacctgagaatttcataatacgggcagagagctgtttgagaaaagagccacagatagttgtgctttgagttttggggcctcttccaaaaagagaagagacttaaacaggatttggcaaacaaaggaaatagtttggccttttaaatgagcagcaggatgaaatatagcaatattaatgcacaggaggctccaataattagaaaatatagtttggttaatctacttcccaaagacacattcattatttgctatgataaattcatttaactcctaacctggcatttgttatgtatatgtatattatgttttatctataacagttgctgtttaaggttatggctgtgtagtctattgagaaaagaaggttgagaaagcatttgccattctgtataactcttgtcctgrttgaggcagtcttaggggtattgtttttttgagcacataacattggatctctgaattctagatagaaccacttacatgatgtgtttaaatttttatttatttaaagaaatgtaagttttcatgttccttccctacctctatctagaaaggaacacttttggcagaaaagtttaaaacttgattttttaagagaggaaacaatattggcatggtatttctgctctgaatgctccagatttaaccaccctactcatattcgtatttcatataaacaaaaagtaaacatttaaatctctccattctactgtgtttaaagtaaagcagatctgaagttgctgcaggcagaatactgttccaattccagaaaaacatgaatttatgattttatatcataaactcacataatttcaacttcatatgtattatatttttaatatgatcaacttgatatgtcttagtacttgcatctgggatatgtatccttgcacaaagattgtgttagaaatctgtaaagaaatcatcccaacttcctaggcaagcactggctaggaagctgggcagaaattctaactktatggtcagtactaaatgcaaagaagaaactaacagctgtcaaagaaaatttttcccagtacactcccctggaagaattgtatcaagttagtaacaactttcttgactatagatatatagatagtaatagttaccattttaaagtgaaatttttgacagttggctgtctccttttctgtttagaactataacattaaaaatgccttctagtttagagatttgatgatcattttagaaataatagcattatagaaatattttgagtactttatgtgcatcttattttcatcatcacaacaatcctattagctgcaggtatttgtctccattttacacataacagcagttgagcctttgagagattgaataatttgctcaagaatgcagattggtaagtgggagagtcaggatctgaacccagctcttatttatttaactgtaatgattgaataatgtagtagtttcttttacctcctcattttcaactttcttgagttgagatctgagcttactaattttccatcatccttgttttctaatatgygtttgaggttataaatccttctaagtatcggccaggcatggtggctcatgcctgtaatcccagcactttgggaggccgaggtgggtggatcacctgaggtcaggaattcgagaccagcctggccaacatggcaaaaccccatctctactaagagtacaaaaattagccgggcgaggtggcacgttcctgtaatcccagctactcaggaggctgaggcacgaaaatcgcttgaacccaggaggcagaggttgcagcgagccaagatcgtgccactgcactccagcctgggcagcagagtgagactctgtctcaaaatcaatcagtctttctaaataccactctagctgcatcccacatgttctgatatacccttccttttttggtgttttgttccatgtatttttaaatttccattttaatttttttgactcacatatttcagatacttttaaaatcttttttagaactgtgagtttttgaggaaatatttttcaggtccatctagagttttaagaactaaatataagttactggagaacaaaatttgatagagagttgctttttcagagtataaactgatcatgttaaaccagtagttttcatctgcttttggttttcctataatgggccacaccacctgaaatttgatagatttttgtcatctatttgtgactctctatattggctactcttgtttaatgttgctgcctctaatgctaatcttcagctctgccacactgctgactttcctttttggttcacgttcccattgagcataatagaacctgtaaatggtcttgttctgagccaacagaagcaacacagacacataagacaatgccattctgtctttagatctgttgtcagaccatagtccacggttccctagtgaagtttacaagaaggctctttagtttgttctatgattattttggatttgtgctgcccagtatgataacctctaagccacatgtgattattgggtacttgaaatatagttagtctgacctgagattacattattaaaaattaattttacctgtttatttttactttaatgtggccactagaaaatttaacattaaatatgtggcttacaagatatataagtatagatgtatcgaataactctgtttggggcttaacagtgatgagcgaaaatgcaatgtagcagaggacagttttccccttagcttctacatgaaattctggaaaagcagagctcagataatacatcttagaattccaggtttgggcacgtgttttgggtaaagcaggagtgatgttagtatatacttactttctgaagaaagcagccaaaaacctaatcatccaccagagaacactagccatgttgaatccacaggttggttagatttctgtaaaagtctgaagatttcattccaatcatccctctaattctcagacatgcagttttatcattaagccaggaccattaaaacctgctttaaaagcttgttttgtctaaaggacttaagggagcaggaacagatggggatagatggcaaaagtgggcccctgtttgtcagaaggtaaagatattgtcccctaatctgttttctgctcctaacggcttttccacttctcagtggcaggtaggaaagtgaggggctgatgagagactgtagctctatcacacctcttttccattttcctttattggattacagatttttgtgaccttgccgtaacctgtaattgttagactgtgagcttcttgaggacagggcacagagaattagtcatstttatattacctgtaaggtacagtaagaatatcaacaacagtaaaatcagttacccagtgctgctcaactctttcctattatggtacacttagacagttagaatatttgtaccacaggggattctggccacccagtacttcragtccacacaactcttttgtacaaattataaagtactggtgtctcaagttactttactgccatctgttggaaagttattgtaataaaaatgcagggctatagtgactgttaagagtggtgccctccttcagagttattcagtgtgcagcctgctcagctgtacatggtagtcctgaggctacytcaggagcccacctggccacctagtgggctgagaaaatcaatatttgaataaacctcaacccgtgagtgacacatcaatgtgtcttgggaaatctgatactatgctaaggacgagcctcaacagtaaccctataaagcaggagttcttataattccagtgttttggatgagcagtctgaggcatagagaggttacatgaatggcccatggtcatgcagctatcagatggcagaggtgggatttgaatggaggcaatgaggctacagagcctaggttcttaaccacagtgatacggtaaacctgttaaaccgcatcagatgcaacagtttctcagtcctgctgccctttctatctcagcccactgtaactagtttagacctcagcccctgagttctttgaatgagtctataggttttggcaaaggaagaggtatttgtgcttttttctgccagtacttgtttgtgttaaggttaagtgctatcccttctctatatttcagaataagctctggtcctcttcccatcctgtggctttacttctccgcacagcccctattcttggcatcacagagtgatcaactcagactgctatcagccacctggggttgatccattctcttctaaattctcactcttctagattctaaagccacgaggcctatctctaggactctccctccttctttctgtttctgttggttcctttaatccccaccgtsccccrccacgccttgtataacccttaattgctgtactccctggcaacatctctcactttctctccaaatggtcttactatctgatttagaaggaaagtgcctcagggaagggattgtcttgttatgttgtgaagcagcatctgaagtgccccataaattagcatctgtagagagttttgtgtatactaattattattattattgaaatacaaaaatgctttctgaaccatgaggaattagactaagatattagtctaattgcctgtacatgttttttaaaaaggagggaaaaagcctctcttcctgagagagctatcagagcctcagagcagccgccaaaatccctatacttgttctgggttattgtttcagtgcttttatgtttattcagaggaccatgtttgcaagacagtaaaataaagtcctgttggtcatgtggatccatttggaccatttattgtgatcagaaaggtagaaatggccctggagcaactgccttcagtttgttttggcccagaatctcttatttccttagtgacacttatggttaaagtcaatggaattcatttttggggacacagggggttttaagtaatttcatttatattatgtttatgtttactgccagagtgaatcaacatttttattagcattttataatgcacatggagcttttaagacttgaatttgctgtagacatgtatgacagaaagactcgtttacaggactactggtcttttccaatgcttgctttgagaatatacctaaaagagtggtgtctagctaaatagcttgctttaaaaatctttatgttagaatttgtttgccgggtttttctgaatatgaatgttagtatattttgattaacagtttaacaaatgtccctttatgaatgaaatgctagtcagaataaactgaggtgaccttaaaattacctattgaaggctgggcgccgtggctcatgccagtaatcccagcactttgggaggccgaggtgggtggatcacaaggtcaggagttcgagaccagcctggccaacatagtgaaaccccatctctactaaaaatacaaaaattagctgggtggggtggcatacacctgtagtcccagctgctcgggaggccgaggcgggagaatcgcttgaacctgggaggtggaggttgcagtgagccaagactgtgccattgcactccagcctgggtgacagagtgagactccatctcaaaaaaaaaaaaaaaaaaaaaagcctattgaattacttctaaatcttaaatagaaagtagtggaagaagtttactacttatgcaagtgtccatgtctgagagacagtatgatgtcagggcctccttgcattgtccgactatgtagggtcacaattgacacactggatacattgaaggtagaatcacagagcatgcaattgctttttatcctcatccatactttctgcagcattcctccccaccctaagacacagtcttattaygccaaattgttcttgtcttcaggcttttggtaactatagaacaagttgattcaaaaaacaagctcatstcatttttagatgattaactcactttggggactagattgtttccttttccaggttacatggtgctgctctaggagcagttggacactttatgcttgtaaagatcagggagtactgcagggggctagacagttgtcagattcaggctgccaaagagctgagggatcacttattgtagtggttctccagctctggctatacatcagagtatcctggggagctttctttacaagcaccagtgctggaggtgtacctcttctgtttacaattggaaaaagtgagcccctgagaggtgaattgacttgtatgtggccatatacaattaggtgctatgaaaaatcatgacattaggaggtaataacattattttcagatcctagttgaaatgctctcttattttggattgagcaattgttaaatgagatcataagcagtgcagaaaacaaggtgggaccaccttgacactgtcattggcttttgaagtatctgccctgtaataaaagtaagtataacagaaccaccttcagtgccttccacatattattcatattgaggagagactttactgtcagttgtgacaaaaccttagtgtcagtctggttacatggtagttatacctcctacccaggccaggacttgtttgttcagtttttctgtgggaaaaggttttcaagtgaagctttaatcatacctggtaaacagaatgaagcaggtamgctcttctaattaagcacttattaaagtgcttaaagtttttcataatggaagtgtgtttttattttcaaacaaaggcactgtaaaaattttagataaggagacagaacagtgtcagtcatcattccctttgtaattattgagggcagaggggcaggaagaggtacaaatatcatcaacatttaccaaaaaactrtggtatggaggcctttttgttaggctctggaaacacaaaggttcagcccatacctttgagaagtttgttattttttattcagagagaatgtgtgtgtgtgtgtgtgtatgtgtacgtgtgtgtgtttaaaatctcttgatagtaatttgtatttctggtttttctaaatacaaagtttaataaacatatcctaattaccattttaacaaatatccttttgtgataaggcgaacaactaagccaaacaactaagtcaaaaattattttaatatatttgagtatatgtgtttatatgttaatatacaatgtgtgtatgttgttaatttttaatgggtatgtacagcatgtatgggttgtgcagtgattttcaagtgagtgccacagatgaaaaatgctacctcacaggtaattgtgagattgagacacttgatgtaaaatgcttaacactgtgtctggcacatagtaaatgttcagtaatcctcattatccacatatttattttactaccattgctataggaattcataggaaaaagagaactgtaggttaaggagatcagagaaaaagaaaagcataatttaagcaatacattttgcctctattttatttaacatatcttttgcctaagacttaaattgctaacagcaaacactttggaaagtattatataatataaatrcatattaataatgtgacctcttttatttcaggaactttatattgctgttggaatatctggagccatccaacatttagctgggatgaaagacagcaaggtaattgtacatcagtgatgttaaaagaaaacgtttccacattttaggatttgkcttaccttgtatgtttccatgtagttacartgcatgtagtcaagccattcacactaacgtagatctgggaactgaaagaaataaaagctaccgttcactgccttaaaaattattggtcacagaggcagtgctgtgtcatggaaagaggcctgaacctgagttatagctccactgctaacttaatgcatgatgagtgctgtctgcaaactcagtttctttgtctactaaatagtgggtattgaatgatgatcactaagttgcccttcagctatcacaatctgtggatagaaaatatcagacttaaacaatttgatgaggttctgaacgtgtaacttatttttgaggttttgatccctgattctctctctgtctgcttcactttggtcctgtaaccctcacaatctcatatatcagcagggccccacttcttgggttgttatcaaagtataaccaacacattttgggttggagcatcaggccatcttaatatctcagtatctcagtaattatcaaaagtgcaataagtatggggccgggcgcggtggctcacgcctgtaatcccagcactttgggaggccgaggccagcggatcatgaggtcaggagatcgagaccattctggctaacacggtgaaaccccgtctctactaaaaatacaaaaaaaattagccaggcatggtggcgagcgcctgtagtcccagctactcgagaggctgaggcaggagaatggcgtgaaccgggaggcggagcttgcagtgagccgagattgcgtcactgcactccagcctgagtaacagagcgagactctgtctcaaaaaaaaaaaaaaaaaaaaaaaaaaaaagtgccataagttgaggaaggaaacacttgatttttatttatttatttatttttttgagacaagagtctcgctctgtcacccaggctgaagtcgcccaggctggagtgcagtggcctgatctcggctcactgctagctccgcctcccgcgttcacgccattctcctgcctcagcctcccaaagtgctgggattactggcataagccaccgcgcccggccaggaaacacttgattttaacttgctacttggactactctgaaagtcctgtgtaatgattctgaacatatatttcagaatatgacacattaattcatgcataataatatatagtttgaattatgaacttacctttcatgaagtcagagatgcctctgacattcctgcatttatccattcagatggaagcttgatataaaagattataaaacttttaacaggcttaacttcttctaatttgaaatgcatgcactacctctttgtagcttctaaatgaactggcccaaaaccagtcagattttayagttggatggtaggtttctttactgaactatgaaaacagcagtgccaatggggaaaatgtgattgctgcattaagaaaaaataaataaataaaagaaagaaactccaacaccagcagccttaaagtatatttttagccagaccagttcagacatagctmgaattctgcttctctaaaaataaaagattctgcctgtcaagaagataccagtgaaaattctcaccccatgccaacagggctgrattgtgggagagacactaggtagtgtangtcagagcaaatagggaacagttgaagtaaggagactggtgttgggggtcagccaagactttgtatctccatctagtcaacagatgtttattaagaccattccttgtactagaagctgggaatgcttaaaaagatatagcccttgttgtcactgtcttatcctgttgtctgtgtcgtcctgtgttgtcatagccccattatctgcataggagacagtctttagttctaaaatgggatattagaatggtttaaatctgacagttgcattccctgcaagctgcaattttaattagaatcctggtttagttgaaggaattcaagatttgattgttaaatcaaatgaatctaatgaaagcactttctgaactaatacacagtaatatggttgaggccacgtgcaatcccagcactttgggaggccgaggcgggcagatcacctgaggtcaggagatcgagaccatcctggctaacacgatgaaaccccatctctactaaaaatacaaaaaattagctgggcatggtggcgggcgcctgtggtcccagctacttgggaggctgaggcagaagaatggcgtgaatccaggaggcggaggctgcagtgagccgagatcgcgccactgcagtccagccagggtgacagaacgagactccatctaaaaaaaaaaaaaaaaaaaaaagtaataataataatatggttgaatacaatctatgcatttcaaagcttagtaaggaggaagaacttgagcttgtgaggagctattgagagagctttggatacaagcaagactttatcatagttctttacaattgattatttaggaatattattttaataatctgaagaacaataaccagccccacatcttttttgttaaatactgtagtggttccttgcccacagttatatgctctctctttaaaaataacttttaaggcaggcatagtggcactgtaatcccaaggcactgtaatcccagcgctttgggaggccaaggcaggaggatcacttgagtccaggagttggagagtggcctgggcaacacagtgagaaccccatctctccaaaaaatgaaagaattatctgagcatggtgrtacacccctgtggtcccagctactcaggaggctgaggtgggaggatcacttgagcccaggagatcaaggcttctgtgagctgattgtaccactgcactccagcctgagcaacacaatgagaccctgtctcaaagtaataatgataataacaattgttatatagtataatgaaaaagctttcggatgattaaactcccagatgtctgactaagtggcctctagaagaataatttaccatcaataactaaacaaatctctgcttatcgccgtgaagcaggttacacattcccaaaagagaaacacgccaatgcaaatcaacacctgcaattcagaatgtttgttcttgtgcctttggatttgaggctcacgtttgaaacttgtttattgtctctgactatgcatcttaatgtgtgtagcatgtttctctggattagcagttacctggactataccatgttccaatcttagacattctggcatcttctgcacatctctctgaggaacccctctaagggaaatacacagatgttggatatcctgtagcctgtattttaagtcaggctacatcaaaatacttaatgtattttttaataccagctgttttcacaacatacaatgccaggtaggtagaaacttaattttacttctagagatttgaattatttttagtccacaatctattaaaataatactacattagagtctaactgcagtggtgttagaagcatctgtggggaataccaaactatttgtactgataaactatctgatattaataaaagaatgatttgaatgatagcttttcctttttttttttttttttttgagacagagtctcactctgtcacccatgctaacatacggtgcacaatcttggctcactgcaacctccacctcccagagttgagcgattctcctgtctgagcctcccaaacagctgggagtacaggtgcgcaccaccacacctggctaatttttgtgtgtttagtagaggtggggtttcaccatattggccaggctggtctcgaactcctgacctcaagtgatccgcctgcctcagcctctcaaagtgctgggattacaggcataagcttttattttttattgtagagatggggtctccctgtgttgcgcaggctggtcttgaacgcctgggctgaagtgatcctcccacttccacctcccaaagtgctgggattataggtatgagttaccatgcctggcctgcatttaagaatatttttatagcaaataagagaaatgtttgacagcttttataagagatataagtaatttgcttcttttattaatctatttgctatgtacataaggacttaaagctgtttaacgtcccttactaacaggctgacaagatactttagctttcatattgttagaatatcccagaataattgttttattttattctattgkattttattttatttatttatttatttttgagacggagtctcrctctgtcgcccaggctggaatgcagtggcgcgatctcggctcactgcaacctccgcctcctgggttcacgccattctcctgcctcagcctcccgagtagcttggactacagatgcccgccaccacgcccggctaattttttgtgttttttagtagagacggggtttcaccgtgttagccaggatggtcttgatctcctgaccttgtgatctgcccacctcggcctctcaaagtgctgggattacaggcgtgagccaccgtgcccggcctatttatttatttttatttttgttgagacagagtctcactgctggagtgcagtggcgtgatctctgctcactgcaacctctgcctcccaggttcaagtgagtctcctgcctcagtctcccaagtagttgggattacaggcacatgccaccatgcctggctaatgtttgtatttttagtagagacaggttttaccctgttggccaggctagtctcgaactcctgacctcaggtgattcacccgtcttggcctcccaaagtgctgggattacaggtatgagccactgtgcctgtcctccagaataataattttaaaataataaatgaaggacaaaataatttgcactacaaaggctgtggatttgggtatagatttgttactttttcacctaaaatcaaatattttttttgtaagtcaaaagaagaacttttaaaaaataatgattttaaactctttaatactgagatgggctagatgtgggtaagagagaattttattacattccaacctggaaatttctaataaatttacagtgttgacacagatgcctcaaatcttatttggtagayattttaagaatattaatatattgtaagggaagttaaaatagaactatcagtctgtgtgaaatgttttcttggtaaaagtcaaactctttgtttttatttcacagacaattgtggcaattaataaagacccagaagctccaattttccaagtggcagattatggaatagttgcagatttatttaaggtaagctggccttgagagaaattgctattatctagattgtcatccgagaaactctcagaaatggttagggatgaagctattaaaagaaaacattgtgtgtttgtgtgtctgtgtttgtatgtatactgttaatatatgtacacaattttgacctacttaaagttaagttgctctaagagtagatatgtgttgtttatatagagcattataactttccttttaagaaagagtccaaattgtctttaaaatatccacatggcggccgggcgtggtggctcacacctgtaatcccagcactttgggaggcggaggcgggcggatcatgaggtcaggagatcgagaccatcctggctaacacagtgaaaccccgtctctactaaaaaatacaaaaaattagctgggcgtggtggcaggcgcctgtagtcccagctactcgggaggctgaggcaggagaatagtgtgaacccaggaggcggagcttgcagtgagcagagatcgtgccactacactccagcctgggtgacagagtgagagactctgtctcaaaaacaaaacaaaacaaaaaaaacccacatggtttttggcatctcatgtgctaagttaatgcacaatgtgaagtgattcaagtaatttataacctggaatcatatttggcaggtaccctaaagaaattaacatcaaacccccttattcagggatttgccaagaatgctagagcttttcaggggagagtaggcacccatatccagcttatctgtctcaataggaatgctctgcttgctgtgtttgtgggttaatggccttccttagctgacgagtgtagggagagcacttatttctcactcctcacactcttcacttttgagtgttccttctctcttgccgtcacctccatatttgaccttcccatgagaaaaattactttcatgatattaattagtgaattacaggtgatgagcacctgatactcatttggctacatttaaaggtcatgactcatgcgtggcctggtctcttcttttycctgggtctgcctacacgtttctaggttatcttatgcagaaatcacttatgcaggaattgacactctgaaaatagcatccaaccctaggagaagtgggtttgctggggtgaggaacccytcatgtagaaccacagcgaggggctatgggccttagtggagaggcttcagcctgagaacagagctacaggtggttccctcagcaagaggactggcccatttctgtgacttcaccagcactgcatatgatctagaggaacctagtgagtgtgcttggagagtacatttgtactttgaagtatgttcatgctcagtgaaggatggaaataggacccttgagccgattactccgtgatggctcagactgcatgcaaagactaggatggggctcttgctctggctcagtgttgggcatacttcccctcagaaggcccccgccaaagagcttagattttggcttgggaaaaacattacccctcttcagtaaccctgaagctctgtatttggtatttgggattcaggtaggtcagctgctcatgttgcctggcccaagtgtgtaagaacaaacagtaatgccagtcattttcccactaagatgttccagtgggaaggggggctggtatgaaaaagagaatttttttttctctgtgtaatgataactttgttcacgtagtaagaattcagttcttactattggtgtgaatagggggtaaatattatttttatttaaaagcaaaattaaatactttctgaacctcatccatgtttgcaagtagatgtctactgtggttgccttttttcctcaagagaatattttaataaacttgtaagtaattttgttacatttttctgtctgcctgtgtactatgtattaaaactcacatgggggctttcatgataaaaagataaactgttaagcagttggaaattttcagtgttcttccagtggacacctgccttggggcaggagcttctttgtagtcattattgatagaatggggtcacacacattgtgctcctgcattaagggcagctccaaggtttggcatgagactatgcatgtgtgtggacacggaggtttctcagtgagaaagagtcctaagacagtgaagtggaacgaggccttaaaaatcatctagtcagctgacttccagtttcaggttctcaggctccttttggtattttaggaagcccacattggactagagagagacttcagaccaagatatcatgtttatgttcttttagctagaattgtgttaaggcaatgactatctcctacagcttagaagttctgaagtacatggccaggagcggtggctcacacctgcaatcccagcactttgggaggccgaggcgggtggatcacccgagctcaggagtttgagaccagcctgggcaagatggtgaaaccctgtctctactaaaactgtgaaaaacacattagccgagcatggtgatgcatgcctgtaatcccagctacttgagaggctggggcacaagaatcacttgagcctgggaggcagaggttacagtgagccaagatggtgccagtggactccagcctaggcaacagagcaagactctgtctmwaaaaaaaaaaaaaaaaaaaagttctgaagtacagttatatatgtatttgattaatacaaaagtagagaagttaatcactccttaaaaaatgcagtttgggaggccaggcacaatggcttatgcctgtaatcccagtactttggaaggccgaggaaaggcggatcacttgagtccaggagtaggagaccagcctgagcaacatggtgaaaccccatctctacaaaaaatacaaaaattagctgggtctggtgacgtgtgcctgtggtcccagctacttgggagactgaggtaggaggktcacgtgggcccaggagattgagacttcagtgagccatgattacaccactgcacttcagcctgggcagcagagtaagaccctgtctcaaaaaaaaaaaaaattcagtttgggggaaaaaaactaaagattataaaaatattaaacatatggcagactcctstttgttaccatgtgagtaacacaagccaggtgcattctttttaagttgcctgtcccagagagatgtgatttgggacaatccacaggttatgggcacaactaagccagggtcctgcttctgttccccttctctctcatttctctgcctctctggctcagcaggtactacagctgggtggctcaccactactattgtaccttggataaggtgcagtaaaaatcgcacctttgacagactctaggaacctacagagtacgcatgaagttgttttctcagctgaaatcagaatgagcttattgtaggtgaatactgtagtaattctgacacaagagcacagacaaagtggtttggtgaatatattccttactggggcgatctcgtttttaaaaaatcaaatatttaaaatattttaaaaatcaaatatttaatacttttgattaaaaaataaaaaatacaatatttgtataattatatttcttaatgttatatattttatatttttaatattttatttttattttttgtattttatgtattgtaattatattttaaaattataattttaaaaaatatatttatataacattaagaaacatataaggtaatatctttatataacattaagaaatacaattaattatacaaattatgggtgagaattaattagcattacctattttggcttatgatctaaagaaaatagaagtcaaataatagcgtacagaaaggacttttttagcctaatttttgtgtgaaaaytttaaattgcaaattgtatcatgtataacatgtatatacagctgttagactaataattccctaggtgatattttgctcaccaagtagaaccgtatctggagtaaaaatgaatatgcataacattttattctcttatattaattgttttgcttgacccttcaacaatcattagttataaaggacaagtttgtttttccctcagaaataatatgttatagtaattaagagctttaattccaattctgccttggccacatactagttaaattatcttggctaagttatttaatctctggacatcagcttgcttgtaagtaatgtaaatattacactacctctttaaaggttgtaatgaagattaaatgagattatactgtacctaatactaatagagtctgtgacaaatattagcctgcctgttctgtccaggtacatagtaggtgctggtaaatattataattgtagtcacagtgatagggcatagggcaccacctgttttttgtttgttttagtataacagctttactgagatataattcacgtaccataaaactcaccatttaaaaatgtacaattcagtgggttttagtattttcacagttacacaaccactatcacacatttcatcatgccaaaaagaattccatacctgtcagcattcactccctgttttacattctgcatctccagcccccagccccagctcctggcaaccactaatctactttctgtttctatacattggccagtcctggatgtttcatataaattgaattatgtaatatgtgatctttgtgattggcttctytcagttagcataaggttttcaaagttcatccatgttatagcctgtgttagtactttgtttctttttcttgccaaataatatccattgtaggggtatgtaacattttgttcattcatttatcatttgatggacatgttgggtttttcccctttttggctattatgaatgatgctgctatgaacattcacatatgaggttttgtgcagacctatgttttcatttcttttggatggatgtctaggaatggaattgctgggtcacctggtaactctgagtttaacattttgaataaccgtcaggttgttttcaaagyggctgcccccttttacattcccaccaaaaatttgtgagggctccagtttttctatatactcattaatgtatgttattgtctgtctttttaaatatagcccttctaatgagtgtgaggtggtatctcattgtggttttgatttgtatttccctgatggcaaatgacatttagtatcttttcatctgcttattggccatttgtatattttgtttggagaaagtttatttagatcctttgtaatttttaaatcacattatctttttgttcttgagttgttagtgttctttatatattatggatataagtccctttttgaatatttgatttgcaaatagtttctcccattgtgtgggttgtcttttcactttcttaatggtgtcctttaaagcatgaaagttttaaattttgtcaatgcctatgaaaaagggggagaaaaagttttaaaataaagttttaaattttgatgaaatccagcttaccaattttttctttgttgcttatgcttgaagtctcatatctaaaaaaccattgccagccaggcatggtgactcacacctgtaatcccagcactgggaggccaaggtgggtggatcactcgatgtcacgagttcgagaccagcctggccaacaaggcgaaaccccatctctaccaaaaaatacaaaaattagctaggcatggtggcacgcacctatagccccagctactcgggaggctgagatggaagaatcatttgaacttgggaggaggcagaagttgcagtgagccaagatcatgccactgcactccagcctgggcaaaagagaacccatctcagaaaaaaaacaaaaaacagaaacccattgcctaatctatagtgtagtgaacattggcctacaagtatctgctcaagcccctgctttcagttcttttgggtatataactaggagtagaattgctggatcatatgataattctgtgtttagctttttgaagaaccttcaaactgctttccatagaagttgcatgattttacgtttccaccagcagtacacaagggttccagtttttccacatcctcagtaacacttgttattttctgttttttaattctagtcatcctagtaggtgtgaagtggtgtctcattgtgactttgatttgcgttttcctaataactagtgatgttaagcacataagcatatgaaaagatgttcattggccactcgtatatctcytttagggaagtgtttatccacctcttttgcccattttcagttgggctgtttctctttttgttgacttgtgtgaattctttacatattctggatactaaacacttatcagagatatgatttccaaacgttttctctcattctgtaggttagcttttcaccttcttgagaatatcctttgatgtgcaagagttttagattttgatgaagtccaatttatctttttttttattttgttgcttgtgcttttggcatcatatctaagaatccattgccaaatattgggtcatgaagattcacccctgttttcttataagagttttatggttttagctcatatatttaggttgttgatccattttgagttaatttttgtatatggtgtgaggtaggagtccaacttcattctttggcatgtgattatccagttgtcccagcaccatctatctgttcaaagagactattctgttcccattgaatgaacttggcaaactacttatctttctaaaccttcttttgtttcctcttctcccctgtagtcactacaatctctttactatctctggaacctgcagttgtttatctctgtctgtgcctcattttttgcctagaatccttttcttctttagtttgatgttctgaattttcctaatccacactgatcttcctcagaactcctgaatttggagcttttaatgctattctcttctccttctcctacattccagtataagctgaggacacttctgattgggtggttcataggcctctctgtctatgcttgccaactaggaggcagaactcctctgtcactcccacagtgacagagagcttctctgtttcccttagtactacctggaggaagtactaagtgaatgagtgaaacatacttgtactgtgatttatatcagtaggttgtctttttttaaaaaaacttaagtgacttttattgggtcttactgagtagggagctgcctctgcaatatctaaaagagaacagaaacaagaatccagayctttcagtgtgctcaggccatcagacactcaatgaacctgagttagcatttcctttttcctaaataaggcatcatgtggtatgctttaaaggtgtgcagttgggctgggtgcagtggctcacgcctgtaatcccagcactttgggagcctgaggtgggtggatcacctgaggtcaggaggttgagaccaacttgaccaacttggtgaaaccccatctctactaaaaatacaaaaaaaattagccgggtgtggtggtgagtgcctgtaatcacagctacttgggaggctgaggcaggagaattgcttgaacctgggagrcggagcttgcagtgagctgagactgcgccattgcactccagcctgggcaacaagagcaaaactctgtcttggaaaagaaaaaaaaagtgtgtggttgatctaataaaaaaagayagatgatagagaaaatcctctcaaccctttcatggggagtgtggtaaggatatattcggtaaaattttaaaaagttatatattctaaaccaaattagtgtttcacttcgtggtaaaagtagttgggctttatcttatttttcatgaaatatacaggtcccgtgtgaaactcagttagcatgtcatctgtgtgactggcatgagctcatggtctctccactgaggaaagctgggagaagtggtgccagcacttaatgccacccctgagcaaatgcctgytggctccatggtaaacatgggccttttaataggctggagacagtgacattcggaagaaacaacatgtcgacaatttccttaataaattttgtacgaacacattatttccacctaatggaaatgtagctctcttaaataattgagaggctgtattcatcagtggtgagttcagctggaatctttgtgagctaaggcagccgaaagccccttggaagactgggtaattgataytttgcacaagtggctggaccagttttcagagtatctgtgtgacattccctgcagcccccttggacagctctcctctgtccaagcagtcacaaagcagctctacactggaagctccagttgcagccactgcactgccacgactaagggttagtaattaatcctttttaaaatgggagccaactcaggccatttccccttgctgtggtttcttactgtgtctgctgaccggccactgcattagcacacaaggtcttgattttaataaagagtgatgatattgaatgttcagcatgtagcacatttctgtgtgccagatgatagtagcatgctgctgaaaaagcaaccaatatgtttgtgaaatgaacaatgaatgaatgaacgaacagtgagagaacaagtataaaggaggttggcaggagtcataattgcagtaagctagagactttggtgtggacttggaaggaaagtcaggaatgcagttaagggtgggaagaatgccaagcaaaacatgaaggtaaatacacagtactcttcacccagacaagaaaaattgggcttcctgtttctagggtgccttcttgaaatttgtggttgggtcacaaagccaaaaggtagcagtgtgtgcagtggttcacgcctgtaatctcaacactttgggaggctgaggcaggcagatcacttgagcccaggagttcgagactagcctgggcaacatgacgataccccatctctacaagaattagacaggttggtggctacttgggaggctgaggtgggaggagtgattgaccccaggaggtagatgctgcagtgagccataattgtaccactgcactgcagcctgggtgacagagtgagagcctgtctcaaaaaaaaaaaaaaaaaaaaaaaaggcaaaaggcacctaggcaatgagtgggctgtaagccctgtcagccctgggtcctgggtagtcgccctgggtgggaagagagactaccggagaacagggggttcctggtggagaggagggggccctcgtgcctcaacagtgatttgtgttgtttcttttggcctccctgtaatgcttacggagctgtgaccatatcacagtgaaggctctagttgcttaattactttttgtttttatttgcaggtagttcctgaaatgactgagatattgaagaaaaaatgaatcaggatcatgccttaaaaagaaaacttttgttaaagtattccmctgaaatcacagatatttgtgggtattataacaatcattggaaagcatggagagctacatttcataatttgagggaaaatttctaacagatgcsagaatgcttgtttatgggattgctgtgtttccytttaattatttgtggttccaaacaattattgtttgaactttttwaattctgtactaaaatctataataaagcttttccacagctttaaaactatcagaaatatgcctagcctctagagaaaattgaagaaaaggagtaaaaattttgtttatttatttatttttttgcctttcttgttcatggagagctctatgttttaggaagattgtaaacatgattgtctccaccagcctaatcaacctactaatctcattgttgaagggcaaacttcataggagaaggtaactgaattggcaagtgcagagttaaaaaagcacggctataaagcatgaatattatcttaaacatactccagtcttcagaagaccatagctaatgtgacaaaagcagacctgacttaaacctgacccagctccatgtatttagttggcttaaggtaaatttcattttccgtttaattttaaggttttgtcagtttataggacttttgtctgtaaaggagggagagtggaggaggggctgctttgagacagcatggcctctgatgcaagcagatagtttgatgttattataaacattcaaaatcctgtgcagagaatgctctagcctttcttttgccttctgttggcttcttttgggctctcttaggaagcacccaggcctgtgtagtcacctctggcactctcattctgctgcccagggcacagctgaggtccaagagtgtcaccagggctgcagctggtgtggatgcaggcccaagagcagaggctggtgaggctttgaacaggcctgcaggaaggcgtgggtaggtaggtgagtagaacaaagagggctgccctcctgaatcagatctgcagaagtaggagtagtgacctggatcaagcagacagtagggaagagaagggaagtgataagtgatggaggtggctagagtgcctttgtgtgaccagcctggggcccttccccagctgactagtgaaccctttctgatttgtgtcacaatcagttgctataaaacacttttaaaagttgtatctttggcatttcagtcttcttttaatgagatgagaggagagcagtagaatgatgcctctttgcaagtaatgtctgttagaatagaagaatcctagaatgtctgagcccggtgattatctggtcagaccccttgttgtatagatgggcatactgaagcacagagaagtgaagaaggtaaagtgacttggccaaggccacatggcttgaatcacctttgggagagtaattcctatgtcttgtttttatctgtgaggttcttcctaagagggctaaccttgctcaagattttttccatttacccctcatccctgttggatgctataactgggggacaggagagatggcaaaggtgatggccacagaggcacccccagtagaaggtgtgctggctcagggagggacatcccaggtggtgcctcggctcagagttgaactggttggtctttctccctttgctccctcctgtcatggctgccctgcctcagcyccaagcagctgttcactggactagtatttacagctcatcatcatcatagcattaagtataatgcttactatataccaggcactgttctagcactttatacatattaaaccccttcagttctcacagcaccctgtaagttagatgctattattatccctcttttacagatggggaagctgaggctcaaagaggtcatataacttgccttaattcggacagcttataaatgagagtcaggatttgaaaccaggcagactggcttcagagtggtaacttcactaaggacgtgattctccctcacctcagctcaagggacagtgcgactgcacagcagcctcaggtaaagagcactaagtacttcatgctgggtgggaggggcacatttaggaccctggttgagaaggagggatgggtgttctggaatagtccctccagtgggattttattcaactcaaaaagtccctctgagtgctcacttagagcttatcgtaaaaaggcagccatgtgaggtggaggcaagttgttaaaactattatatatgcaagaggcacacatatataatgtgcccttttaatctgtttttttggaaaccgaacagttcctgttgactctgcgcctgtgtccagccttagcacccagagcaatagctctggaaacagtatgggggaaaggtgttaggggtagctttctttaattcttgcatataggtttcctgcctttttccctagtttctttgaggtctttggttaacctcacacagcctctgagaatttggtggcctggttattttggcagaacacagagtccctgggaggacagaaataggcatgttagaaaggcagccctctgagggcagagccaaacaggtccatgagctgaagctgatggcctcttcacttgcagaaggcctctttacttgcagaaggcctgaggcctagtaatggccctgggcctagcttcttagtagttgagaggggacagcatcagctttcccccaggtcccactcgctctcagcaattctgtggggacatgttccctgctgggttctctggctcaccagctgtgctgtttgggattctgaagaaaatacctagaaaagtgtgtggtccagccattgccccgaagtagcttgtggtcttgacagggagggacggtatccttccagactctgagagtacaggctgttggagccacagcccccgccctgaaggattttacagctaccaggaaagatgagatgagacatcagtaaaagcagaaagcaggtctcaggatggacagcatatacagagaaggctcatcaggaggctggcatggccattcctcgcaggcaggggagcagaagtggaaaatgatatcagagctcaggtgcatgaggcagtgaggggcagaaacactggggtcagggagaggagtgagggtggtaggtagttgaggccagattggagaggacattgactcacaggctgaggaggcctttttccttagagatcaatggttctcagactttgccctcaaggaacactgccatttccactggaccagtgatggtactgtgaaagttataccatacaggacttttcctgatttgcaggaaaaatttatcaacagcagtttcccagtcttaagtctttcttgcatacttctttctaaacctttggtagctgctaccccttgtcttcttaagaatgtgagcagattccaaggtgactggacagtagcaagtggatctgaacaaagagcagcagccactgacccaccacagcttttgtttttgtcttgggacrtatcagggattttgttgaatatttaaaatactttctgctagttggtaattgttccttgtttgttagaattagatatgtcagtatattaagaatgtcccataaaaactgtatgacttactactgtgccacctgaacaagtcttaagaaacaccgctggcaacagggagccatttatagtttttgaggaaggcctataacttggtggtgtatgcaggacagagggagggaggagaagatggaagccattaggggctgaatcctctggctccagatggatttggctggggatgggctcctggagattgtgaaaatgggtccagtgctgtgggcaaggctggcagagggcagggctcttcctcccaggatagcagtgggagccctgctgcctccagagcctgagcatgtctgctgggctggagggctggaaascccagccctaggtgcactttctgctctctttctgaaagggagggtcagcctgattgcatttcacgctgtctttcactaagggtttttgtttgagtttacataaaagtgggctgaagaggctgggaaacccagagaacaccattgaatgtagcagatggatttggttagctgttgctgagctaaaggaggcttgactgataaccttgtgaaaagtccatgtaggatgatacactgccataatttcttacagctctggtgtttttaaaaaatctttgtggggagcaaatgaaggaagagttgcttttaatccttggcttataaagcactttcatgtatgtcaccccatcagtgggggaaagagtagaaaacatgcaagaaatcagactctcaggagaggaggcagtttgccccaggtcacaacacatgtgatagaactggaacacaaacagaactttggacaaatactacttattaagaactccctgtgtgttgggtacattatatacccttctaatacagcctcctctaaagtgtatatcattacgcctaccttctggatgaagaaatgagcatagagatgaccagaggcagttggtgagatgtgggacctgaactggactccaggtctggaaaacttggcctgtccactagactgtggtcctcccattctctccaggactatatcctctggtttgcattgcttcaaaacagcaggcttgccattagaagcaaggaacaccgatggaattagggattttctgtgaagtaagctggcatttacttcctgtggcattgggactggtgagagggaggccctggggtggctttatctgcgtggcctttgccttcttcatctcctgcaactaactgggcatgtggttaaagacaggtgagtgctttctttttgtgtgctcacctccagctgtgtttccttcccagcgtgggctgcataggggacatttgggtctgggacctggagaccactgggtggactggtcaacaggagccttgggttctcatcctgttcctgttactgccccagaggcaccctggtcaccttccctcctttcaggtttcattttaatcatctgtaaaatggcgatgtgaactaggtgatctttctagataacaagctttaacctatgagtgtattggtgggtgtcatacgaggtgagtagatggagacagtgaatactgtttttgagggcttcttatgcccaagatgctgtgctgagccctttacatacgttatctcatttacgtctcataacctcacaaggtgtaggtttgacctggggcaaactgcctcttctcctgagattctgatttcttgaatgtttcctactctttcccccactgatggggtgacatacatgaaagtgctatataagccaaggattatcagcaactcttcttcagatgagaaaactaaagcctacagagcttaaaacacttgcccaaggacgcatggctagtaaatggtgaccacaggccagtctgctcccaaccacatgccatatcccaagtgcctcaatgggagtgcagaggatggacctaatctagcctgactagggtgggctgcagtgcagggcagcaagatatgaaggcctcaccaagttcagaaggggcagcaaaatcaaccagatgaagaagtgcattccaggcagaaggccagcatggacaaagaacaggattacccaggaacatgacacactgagctgctttctctggaaaatgcaaggtctagactctgatgcatgagtccccttctagccggacactcctccattctgaaccactctttgctcagggaagcaggggtctttgtactgcaatctggatccagtctgctcattggccttttgtggtatttagcacggtgcaggtcccagaaccccctatcgcttctttaatcagtggaggcggaggtgagcatacctagttatgaggcctaattgatgttggggaggttcctagagtgctcggtgaagggtgacccataaatctcagacactgaagaattctgccacatccatcacagtgtttaatgtcctgattgatctccagggtagtcaatttcatttgcttgtttcaggatgaagaggcagcctgcttccctatgttgcagcctggggctctgcataaaattatgccagccctgtctcctggtagcttgcaataaattttagcagcaaatgtttcatcattttccttggataattaactattcaccaggagataataccaaacttttcagcagtggagtcaaagatattcagaatagtgatgaattcctcacttagttaatgtgagggaaatacaagtttttggcaagtactccagtagtactccaatagtactgaccaaagggagaggaaggaagataaggtgcctcctgtctgggggataacagtgcy

SEQ ID NO: 95872 - DNA, 167965 bp, Homo sapiens
gctgaattttcattttcaaatgatgatgtggctgaggggcctgacctgcccagttttccaggatctaggggtggagaaagtcaggagtcctgctcacatttttctttttctttaaattgtatcacccttttctttctgccttaaatccctgtatcccagaagcttcaagagaactgtgaggtgcttcccgcaggccattgactctctgatgctgtatgcaggtaagtgtttcatctcatcccaaattagccagggcttttaggtcactttaggtggagtgaaagcttaactctcagttctccgtcaaagatctttggctctggagtcctctcctggagtctccctggcctttcctggcaggaccctgagtgacccaagtgtcctcctgttctccctgggtcccggctcctggctcccgtgccctgctggccttctttgacaattgcagtgtttgctgttcatctagccattcattacctgtccatccgtccatccaaacatccatccagtgccaggccagttgctgctggttgtgacagacacattcatctccttcttttttttttttttttttgagatggaatcttgctctgtctcccaggctggagtgcagtggtgcaatctcagctcactgcaaccgccacctcctgggttcaagtgattctcctgcctcagcctcccgagtagctgggattacaggtgcccaccaccacacccagctaatttttgtatttttagtagagatggggtttcaccatgttggccaggctggtctcgaacttctgacctcaagtgatctgatcgcctcgcttcttgaaattctgggattacaggcgtgagccactgcacctggcctcaaatttttcatttctgagggactccccatctctgccatttcccacctctgccaccatcttccctccgtgccagacccgagaatgaaaatgccatgaagagagctttgctgcatttgtgtcccttttttttttttctgagacagagtctcgctctgtcgcccaggctggagtgcaggggcactatctcggttcactgcagcctctgcctcctgggttcaaggaatctgactgcctcagcctcctgagttactgggactaccgccgcgcggcaccatgcccggctaattgttgtatttttagagaggaggtttcaccatgctggccagaggtttcaccatgctggccaggatggtcttgatctcctcacctcgtgatctgcccgcttcggcctcccaaagtgctgggattacaggcatgagccactgcgcggggcctgtgtccttcttaagagcaaagcaatccaacaacccccaaaggaaaagtgctggaggacaatgctgccttttcagttctcaaagcctgcacattcctaggtatgttgcatagactttccctccaggaggtgaggttgctgtagtaaggagtcctcactcatccttggccaggtcttctctagaggtgagttcccaaggtagaagcggtgcaaaggctgacctagaggagagagactcgcagctctcactgggatggcagcaagcactggcccattttctcctcttctgggctctgccagggttgcgtaggctgtttggaagaaaacaggctgtgagccctttgaattgcctgaagatggggcaaagccatctatacacaggtgaagttatctttttttttttttttttgagatggagtttcgctctgtcacccaggctggagtgcagtggcgcaatctcggctcactgcaagctccgcctccgggattcacgccattctcctgcctcagcctcccgggtagctggaactacaggcgcccgccagcacacccggctaatttttttgtatttttagtagagacggggtttcaccgtgttagccagggtggtcttgatctcctgacctcatgatccatccgcttcggcctcccaaagtgctgggattgcaggcgtgagccaccgcgcccgaccgaggttatctttttttaatttttttgagacagagatttgcgctgtcgctcaggctggagtgcagttgcacagtctccgctcaccgcagcctccacatcctgagttcaagcgattctcctgcctcagcctcccgagttgctgggattacaggtgtgcccccaccacacctggctaatttttgtgtttttagtagagattgggttttaccatgttgaccaggctggtctcgaactactgatctcaagtgatctgccctcctcagactcccaaagtgctggcattacaggtgtgagccaccatacctggctgatgctctctggtgaggtgatctaattctgggctgatcacctggaaaggtaaagcccgggagagaaaatagaaacgcagaaagagtgttcagaatctatgaggctcattaaattacacagaggaatagaaatgtggtgtgaatcagatgtgcatacagtcttggacagtttttcaggaacaagttttcctttaaaaaaaagttatgtattcattccttgtaaataggtaatccaggccaggcgtgatggctcatgcctataatcccaccactttgggaggccagcgttggaggactgcttgagcccaggagttcaagaccagtttgggcaacatagcaagatcccatctctaccaaaaaaaaaaaaaaaaaaaaagtaaaaggctgggcacggtggcttacacctgaaatcccagcactttgggaggccaaggtgggcagatcacatgaggccaggagttcgagaccagcctggccaacatggtgaaaccctgtctctactaaaaatacaaaaattagctgggcgtggtggtgggcacctgtaatcccagctactcgagaggctgatgcaggagaattgcttgaacctgggaggcagaggttgcagtcagccgatatcatgccactgcacaccagcctgggcaacagagcgagactctgtctaaaaaaaaaaaaattagcagggagtgggtggcgtgcacccgtagtcttagctactcaggaggctgaggtgggaggatcacttgagcccaggcgtttgaggctgcagtgagctatgactatgccactgtactccagcctgggtgacagaatgggaccctgcctattaaaataagaaaaaaaaaaaaaaaaaggtaatccaagcatatagcacataatttttaaaggtgcccaagagtacatagcaaagaattagtctctttcctattcctgtgcccaagtccttcagtttccctcccagagacaacactgttaccaatttaatgtgtgcatctttcttgatatttcctctgaaaataacaagtgtgtgtgtatgtgtattttaaatatatacaaatgggtatattatacacactgttttgaactttgttcttttcacttgagtatattttggagttttttttccttctagcacatatactatatgtgttggggcagatttagaaagcaggaaaagttcatcttgttctcaataaccctgagctttgcttcagatcaagctgtttcttacttctgcctcagaggctggaccctgtcagaggctggaccctgcttcttacttctgcctcagagtgtagtccccggatcacctgaagctgtcctgctcagtgagacatcctgccgtatgacaggtttcactgaaaggatcgtgtcctttcttcttactgaattccccacatctagaattcgttctcacagtttaatacgtgctaggaggaccagtgtcagctccctatgtggctactcaattctttttctaggtcttataggtgggggaaggattttctgggcagtgtgggaggttatctcagatctccatctctactttgtggaaagagcctggcaggggctgtgcaccggtggtggcttccgtattactgaggccatggtgagtccttttcctgaagaggtctgaaatgtagaaagcagaatgtaacttggcccttgcttaacattaaaagactggttagaggatcgcttgaggtcagaagttcgagactagcttgggcaacatagtgagaccctgtctctaaaaacaaaacaaaaggtgggcgcggtggctcacacctgtaatcccgtcactttggaaggtggagccgggcagatcatctgaggtcaggagtttgagaccagcccggccaacatggcaaaaccctgtctctaataaaactacaaaaaaattagctgggcatggtggcaggcgcctgtaatcccagctactggggaggctgaggctgaagaatcacttgaacccgggaggcggaggttgtagtgagccaaggtcatacataccattgcactccagcctgggcaacaagagcgaaactccatctcaaaacaaaaacaaacaaacaacaaaattgctgtctaccatcttatagtcagttttcttatctatctctgtgtgtgtgtgtgtatacacccacacacatatatacacacacacacatatacacacaaacacacacacacacacacatatatataattattatttttttttttgggtgagaggcaaggtctcagtctgtcacccaggctggagtgcagtggtgccatcatggctcactgcagcctagaactcctgggctcacgggaccctcctgcctgggtttcccaaactgctgggattacaggcgtgagccaccacacccagtcagctgattatctgtagaaggagatatcatatgtaccttagacagttgctgtaaagatcaaatgaggtccacacaaaaacttctttttttttttttttttgagacggagtctcactctgttgcccaggctggagtgcagtggcacaatcttggctcactgcaacctccacctcccgggttcacgccattctcctgcctctgcctcccgagtagctgggactacaggcgccagccaccatgcctggctaaatttttgtatttttagtagagacggggtttcaccgtgttaaccaggatggtctcgatctcctgaccttgtgatccgcccacctcggcctctcaaactgctgggattacaggcgtgagccactgcgcccggccacacacaaaaacttctacacaaatgttcatagcagcatcatgtataatagccaaaaaagtagaaacagatgtccatcaatggattaatggataaataaaagatgatgtccagccaggcacggtggcccatgcctgtaatcccagcactttgggaggccaaggcaggcagatcacttgaggccaggagttcaagatcagcctgggcaacttgatgaaaccccgtctctactaaaaatataaaaattagccaggcatggtggcacatgcatgtaattctagctactttggaggcggaggcatgagaatcacttgagcccaggaggtggaggttgcagtgagccaagatcacataactccactccagcctgggagacagagtgagactcttcaaaaaaaaaaaaggtgatgtctgtataatggactattattcggccgtaacaaggaatgaagtgccgatacatgctacaacatggatgaactttgaaaatattatactgtgtgcaaaggaaggtagttaccttcccgggttcaagcaattctcctgccacagcctccccagtagctgggacgacaggcgtccgccaccatgcccggctaatttttgtatttttagcagggacggggtttcactatgttggccaggctggtctcgaactcctgacctcaggtgattcaccagctttggcttcccaaagtgctgtgattagaggcatgagccaccccacctggcctagcagagagcaattttgaatacagctgttagattctgcactcatgccttctctaatccatgtcactggagtagaaataattgctttgacagaacctggtgtagatgtgtctgtaggaagaaactgtaaaatgaatggatcattttgtgaaatatctgccctttccccacctttcttttgcttctttgcctttttctccctagttttcatttctttcttttagggcgtcagccccccacctctgtggttgggagggactattgcacgtctacactctcgtggggatgaaatagtgtttgagttcgttatttgcatttgcgcgttatctccccgaggagatgacagcttctctgccagcagcgggcaaaggtgggctctgaagcagaggagaggaattatcaggaaaagctcattttcttctcctgtcctagggtttcactgatgaaggcctctgggacacccacgttgggggtgggggcggtgaggaccgccacctgcccgcggctcccctgcagccaggccacgcgcgctgttgctagggcaaccacccggccaggcctgcggctgccgggaagccccctcgggagcgcgcacgggaagggctgtgggggcgctggccggctgcgacgtcagacccccgcccctcggcgcctgccggacccagctccattcccagccgcgcctccttcggtgggcagccggccggaactcacgaatcagagcagccgacacatcgtccgctcagccaatcgtagcagatgtgtgatcccgccacctccccggaccctggcggttgtcgctgagttggcgaccgcgggagacgctgctgaggcggcttcggttgcgggtcggaacggcgctgctctgcggggccggtccaggctggcagctgccggcgcttggcggtgagggcgggctcccgagtggccccccaccgaaggcggtgggaccagcggctgaggccaggatgccgtccaggcggcgcggcggctcctcactcatcccaggtaagggggacgcggcgctcgctgcggctccgctcccctctcgtctcctcacacccggccctgtgccccgtcctggcatcccttggccccttgtcgccttctgctcggtgcctcccggttgtccaaccccgcccccgagcgcggagccccgggtctggcccgtccggcccctgctcccacgccccttcccccatcgccggcatttcccgggctcggcttcgccccggccgccggggcctctcccctctgcccyttctctcccttctcgcagccctgggaccacgtcctagccccgcagtcccctgggatgagaccctcgtctcgccgggatcggacatttgcccccacgtctaccccggctgcgcttcttgagctcatcgccccatcatcctacccgttgtacgtagtcctgtctgcatggcagtcgcccgccccgctccaggtgtccctgggtcttgcccttttgctcctaagcaccttcctttcccaactcgcctcttctcccctcactttgaccacccaccatcgcaatctcctcttccttctcttactcttaaacctccagacactttcccactctctgcaatgccggattcatcgcttttttttttttttttgagagatggagtctctatgttgcccaggctggcttcgaactcctgacctcaagctatccttctgcctcggcctccaaagtgctgggattacaggcgtgagccactgcgcctggctcagatccatagtgtaatatcttcattcgtccttacatgagctgcaccccataacatgtaaagtcccttgcccagagtctagcacacagtaggcctggcacatggtgggtggtcacrcatgttagcctcttcctccttccaggcgttttgtactttccagatgatggtagcaagaagtccagtgtccacagggatttgactctgcctgaagaatggtatgggagatggcaggagaaattggtgaactccagtaaagcgattaaatggtcaattactgcattcattaagaagaaacaattctgctatccgtgccatgtattgttttatgttaattgcctttgtaaaggattcttaggctgctagtcagcaggctttgcggtgtaattactccccatcccctctccatccccatctgcagtgtttgggtaactttctttttaggaaagaaagagcccctacctcccagctaaagtggcatagtatataagcaatgtggtacgtgtttatctattagctggatagtccagggagctgcaatgaattttcatcttttaagatccaggaggaatcaggatttggatttcctggaatcagctgctgtacagaccaaatatgcttaagaatgaaacttctgacaagtcctctaagagtgagagaggaattatccacccctctccctccccctctccaaacactcgctcttggaggaaatagcgagtcgatttttaaaaaagagtaaaatacgtttgactttttaaaatgataaaagcattgtcattggccctgtactattcttgccacctttgctctgatggtctcaagcctggacgaatcagtcagctttttctgctcctgggctcccaaggcagactggcaaaaatcatataactaaactgctgggtgctgtttctgcacttctggatcctggagatcctttgacttaacctctagattcctcttatgtcctaaaatctaaatggctgtttatggatctttaccatttttctctgactctttgtcctactcttgccttctcttcattgcttattttgccacttaacttcacagaataaattggtgggcatcagccctgaactcttaaggagaggtcatttttgtctgtgcctgtctgtacctgatttctaatatcctttcctctgatctcagaagaagaggggtcttactttcgaaagctaacgtctttgatctcttcccatattattattttttctgttggatggtatacatcctcaggtttccaccattcagaccaaaacaaagcttttcttgatgcttcccttttctttttttattcttctcagattaacgtggcattccttagggtttcatttttgttcttttctctaatttccttgtgtgattacacttcctttcatggcttcaaatagcacctatatatttatggttttcaaagacgtctatttagtccccgtttctcttgaacctcaggttctaattttcatctgcctactgcatagctgtatgtggatgcttgattacttcaaatgtggttaccttttccttccctttctctccacccatagccccctttaagcacatatacaaacattactattttaagatctttactctagaaaccttaaaatcatcttcttttctcctcacattaagtctagcatagatcctattgttgttgctacctcagatctttttttttcctctcttcataacatcttttttttttctctctcttcattgccagaagactggttcagaccttggttatgctttttctgaacctctgggtcctgtagtctacttaatcctccacgttgctgctggaattggttccatttctgaactatcaatctgatcatgctgcttgttttctttaaaaattctcatcagctcccaaacccttagcatgttgagccagtccttccaagccttctgtagcatgggcgcatccccttcctgggccctttgtgatccagagaaaaaagcagtaaagaaacagaccattcactaccgtaaaatcaagactgtgacagagatgactacagggtgctctgggagcatcaccctggtgagagtgaggacaagtttctgtctacaggcacctaggactttttctgactacccctcctccttagtttgggttaggtgacttttctttgtgtttccacagcaccctgtacatacttccatctccatttttaccacttataccatttttagttttttttttgtgacacagtcttggtctgttgcccaggctggagtgcagtggtaacatcttagttcgctgcaacctctgcctccagggtttgagtgattctcgtacctcagccttccgagtagctgggattacaggcgcctgccaccacacccagctaatttttgtatttttagtagagacagggtttcatcatgttggacaggctggtctcaaactcctgacctcaagyagtctgcctgcctcagcctcccaaagtgctgggattacaggcgtgagccactgtgcccagcccatttttactatttataatgttctgttttcttatttttctcactgacttgagagtgaaccctttaagagaaagagttgtgtcatatctcattgtatctccagtttctagcaaattgccaagtacatagtgctcagtaaactaagttttcagaagagctgaatctagacaaggaaaggtaaggggagatgggcagtttggaagagaaggtaacatatggaaaagtgtgtcttaggctaggcgcggtggctcacgcctgtaatcccagcattttgggagactgaggcagacggatcaagaccatcaagaccagcccggccacatggtgaaaccccatctctactaaaaatacaaaaattagccgggcgtggtggtgggcgcctgtaatcccagctactcaggaggctgaggcaggagaatcgcttgaacctgggaggcagaggttacagtgagctgactccagcctgggcagcagagtgagactccatctcaaaattaaagaaaaaagaaaaatgtgtgataacctggtgcttttgggaaagaactggtaatttggaaaggctggagaatgggcataatgagcaatgaggctgggaaggtatatgggagccgctcatgaatgaccttgtgtgtcctaacacataatcctgatgatagcgaggaacctttgaaggatttcttcctgggcagatcttacaaagtctggcttgttcccatctcaggctttgtgtcttgctgcatgccttgccttttgcctcagccatataaaatcacctctattacctgaacatgcctaaatggctttatgtttctctttctccgtggaatgcgttttcccacttagccacctgtagattatacaggcttctggttatctctgcagtaaagcattcccacatctgcctgcaatccatgtctcttcatctctactgtcatttacttgtttacatgtctttctctactctaagggtagggctttgaaatcaggatgggttttgattcatgtctgcatcccctactctggcaggtaacatgaatgagtattgtgaccaggtatattttgattatgtttatttatttttctagagatgggagtcttgctatgttgcccagattggtcttgaactcctggcttcaggtaaccctctgccttgacttcccaaagtgttgggattatgggtgtgagtcactgcgcctggccccaggtgtattttcagaaaaattactctgatctctggtagcattgtagagaacaggttagagaggggcaagactaggtgcacaaagaccaataggtggtcattataggaatgtaggtgaaagataatgaggccagtgaggctaaggggttagatttgggagtgaatttgtggartaaggagaactggttaggtgtataggtgagagagagggagaaggaagggtcaaggatgacatactgagttcaggcttgggtgtctgggtaatggtggttctgttcatccaggtaggaaatacaggaaaataaacaaattttgagggaaaaggaggaagccaatgataacatcttgatgcccaggaaatcgcctgagagagcagttggccctaaagatggagatatatatggagggtctgtgctagaattgaaagtgaagtcatcagaagtaggtgagattgcctggttcagtgattttcaacataggcactacttaaaaaccacctggggagcttttaaagaatgaggatgggggatcgaggcatccacagggattctgtatcatttggtctggtgcagggccagaccttgttactttaaagatgcttcccatgagatggtgataggtatctaggactgagaactgggctgagagcccaaagagggagtgatagaaccctgaagaacaatagtagtaactcatcctttaaatatcaggacagctgggtgtggtggctcacacctgtaatcccagagtttgggcagattgaggtgggaggattgcttgagaccaggagtttgagatcagcctgggcaacatagcaagatccctgtctctacaaaataggaaaaaactagccaggcacatgtgatggcacatgcctgtagttccagccatgtagaaggctgaggcaggaggattgcttgagcccaggagtttgaggctgcagtgagctatgatcatgccattgctctccagcctgagtgacagagtgagaccgtctgtctgtctgccacacacacgcgcgcgcacacacacacacacaccaggataaatattgcctttgttgacatagtttcttgctttcctggtactgtacatttacctattaaaggagttatcacattttatttaaattatatctgctgggtccatttttatttttattttatttttattttttttttgagatggagtttcgctcttgttgcccaggctggagtgcaatggcgcgatcttggctcaccgcaacctccgcctcccaggttsaagcaattctcctgcctcagcctcctgagtagctgagattgcaggcatgcaccactacgcccagctaattttgtatttttagtagagacggggtttctccatattgaggctggtctcgaactcctgacctcaggtgatctgcccacctcagcctcccaaagtgctgggattacaggtgtgagccaccacgcccggctggtccatttttatagctaaggaattccttgaagtctgaaaccatgccttatttatcttttcatcactgccttgcacagtacttgatacattttagaaacttgataaaagttggttgaataaatcagttgataagtgatataaaacagagcttgaactcatgattttgcaaactgaccagctgtttctttctttcctgcttaacaagtcactggtcaaatatgcgtagtcattcttgttttaaaaacacacagtcttgccgggcgcagtagctcatgcctgtaatcccagcactttgggaggccaaggcagggggatcacggggtcaagagatggagaccatcctggtcaacgtggtgaaacctggtctctactaaaaatacaataattagctgggcatggtggtgggtgcctgtagtcccagctactctggaggctgaggcaggagaatcccttgaacccgggaggcggaggtcgcagtgagccaacattgcaccactgcactccagcctggcgacagagcaagactctgcctcaaaaagaaacaaacaaaaaaaccccgaaacaatctttataaattagagtggattaatataaatattatttgctctgtaatgtcttggcttttaaggtggttaagctgtgacagttactacagaggtttattcaggctttgtctttagaagatactatttaaaatagactttatttcatacgattaaggtatatcgatcttgtatctttttaaaacaaatagctcttgattttaggctcatgagctttggaatttttaactagaacaaaaactgtcaatttgataaaagatcttgaacagtggcataacaatttctttttaactaagaaaattaaggaagtaaggaatatgccttaagcaagccctatacctaaatgaatctcactgggattggtgatgggtaggaagaaataaataattcccatgtatttaagcactgttgtaggaagcacctgtgattgctcatatattgatatcagtgtattttcttttcttttttcttttttttttttttgagacagagtcctactctgtcgcccaggctggagtgcartgatatgatctcggctcactgcaaccttcgtttcccgggttcaagagattctcctgcctcagcctcccaagtagctggcattacaggctcccgctaccasgcccagctaatttttgtatttttagtagagacggggtttcaccatgttggccaggctggtctcgaacgcctgacctcaagtgattcccccaccttggcctcccaaagtgctgaggtgtgagccactgcgcccgacctcagtgcattttctattttctgatttctcagggcttagatataaaccatggaatcttttgttctttgttttttcttaagattttgtcagctgtttctttttataggatttgtggttgacagttctttgcttttaacatttgagaaatgttgagaaacttttttcagataagaaaccctgtcattagaattcattttcttataggtaacatcctttctccccaactgctttagaggttttttctttgtctttagttttcagaagttaaattatgatgtgtctgcacgaatttctttgggtttttctgtttggagttctcttaatttcttgagctgcagatttgtcttttaccacatctgagaagttttcagtcacttcttagaataatttttcagtaccactctctgtctcctttcattctgtgactgaatgttagatcttttgttactgtctcacaggacgtaaggcactattttcttttaatttttttccagtcttatttttttgtctgttgtttagattgggtaattcttgtttcaagtttattgattcttacctgtgttatattcattctgctgttgagctaacccaccgagttattattttggttgtttttcagttctataatttttattgggttttttgtctattctacttctttggtgagattttctattttgtcatttgtttaaagagtgtatgtaatggcttgttaaacaataggctgggcgcggtggctcacgcctgtaatcccagcactttgggaggccgaggcgggcagatcacgaggtcgggagatcgagaccatcctggctaacacggtgaaacctcgtctctactaaaaataaaaaaaattagccaggcttggtggcgggtgcctgtagtcccagctacttgggaggctgaggcgcgaacccaggaggcggagcttgcagtgagcggagatcgtgccactgcactccagcctgggagacagagtgagactccatctcaaaaaaaaaaaaaaaagaataatggctactttaaaatctctgtcagatcattccaacatctgattcatcctgttgttggcatctgttaattgtcttttctcattcaaattgtggttttcctggttcttgctacgatgaatgacttttgactgtatcttggacattttggatattaggagttatagatcatatttaaactttatgttttagtagacagtcacctgagaaggagcatgtagctcccagcctgccttttgtttcataacagctttattgagatataattcacatgccacatgttcaaccatttaaagtgtaaaattcatttacttttagtatattcatatagttgtacatcattaccayaatcaattttagaacatttttactacccacaaaaaaaccataccacacactccttagccattatcctcaactctcctactcttcatcctctccatccctaggcaaccactaatctattttctgtctttatagattcatattatatagaatagaaatatctattttgagcacataataaagacaatcatatataatattgtcctcctttatttcatttttagagtaatatatactattaccctatattaactattaatatttactaatttttttgtaattttaaagtatttataagtataaatataaattatatttatttataaatagtgagctgcaatttatttttgtagtgtttttggtttcaaaatccaactaaaattggctgtatatgtaatgagttcggaagtgtcgttaagaattggtgttgctggtgcagtgactgatgcctgtaattccagcactttgggaggcyaaggcaggcagattgcttgagcccaggggttcaagaccagcctgggtaacatgatgaaagcccgtctctataaaaaaatatgaaaattagcatggcatggcggcacacacctgtagtaccagctgcttgggaggctgaggcaggaggatctcttgaacctgggaggggaggcgagatcctgccactgcactccagcctgggcgacagtgtgagaccctgcctaaaaaaaaagccaccaacaaaaatatatatataaatatataatatgcatttaatatgtttttaaatatgtattatatatttatatgtatatttttattggttaaaatatatatttttatagatatacattttatataatatatattatatattacactaaataattataagatatatgcattaactatataaatattaatatgttttaaatatatatttaatatattaatctatattatattaaatatatttatatatatatgttttttgagatggagtctctctctgtcaccaggttggagtgcagtggcgcgatcttggctcactgcaacctccgcctcccgggttcaagccattctcctgcctcagcctcctgagtagctggaactacaggcacgtgccaccaagcccggctaatttttgtatttttagtagagacggggtttcaccatgttgrccaggatggtctccatctcttgacctcatgatctgcccacctcaacctcccctcccaaagtgttaggattacaggtgtgagccaccatacctgaccctaatattatatatatgtatatatatatattttttgagatgcagccttgctctgtcgcccaggctggagtgaagtggcgcgatctcggctcgctgcaagctctgcctcctgggttcacacgattctccttcctcagcctcctgagtagctgggactacaggtgcctgccaccacgcccagctaattttttgtatttttagtagagatggggtttcaccatgttagccaggatggtctcgatctcctgacctcgtgatccgcccgcgtcggcctccaaagtgctgggattacaggcgtgagccaccgcgcccagcctcctaatatatatttttaagaagaattagtgtcaatttttttttttaacttttgatagaatttactagtgaagccatcttgtcctggtttttctttttctttctttttttttttttttgagacggagtctcgctttgtcgcccaggctggagtgcagtggcacgatctcggctcactgcaagctccacctcctgggttcacgccattctcctgcctcggcctcccaagtagctgggactacaggcgcccgccacgacggctggctaatttttgtatttttagtagagacggggtttcaccgtgttagccaggatggtctggatctcctgaccytgtgatccgcccgccttggcctcccaaagtgctgggatgtgagccaccgcgcccggccaatgtcctggtttttctttgtggaaaattttaaattactctttcacttgctttgttatagatttattcagatttttaatattttcttgagtcagtattagtagtttgtatcttttagaaatttgtccattttatctagattactttgttggattatgcttgtttatgatcacttttatttttgtagggttggtagttacgtctccttttcathgtywttggtcggtcyagctaaaagattgttaattttgctgatcttttcaaagaaccagtttttggttttgttgattttctctgttctattttctgttttatttatttcactgtagtctttattatttccttctttctgatggttttggtcttgtttgctctttttcttttttttttttgagacggagtcttgctctgtcgcccaggctggagtgtagtggcgcgatcttggctcactgcagcctccacctcccaggttcaagtgattctcctgcctcggcctcccgagtagctgggattacaggtgcctgccaccacgcccagctaatttttgtatttttagtagagacgaagtttcaccatgttagccaggatggtctcaatctcctgacctcgtgatctgcgtgcctcagcctcccaaagtgctgggattacaggcgtaagccattgcacccagccctgtttgctctttttctagtttcttaagggagaaagttaggttgttgatttgcaatcttttttaatacaggtgtttacgctataaattccctcatagcactgcttttgctgcatcccatgagttttgtactttcaactcaaagtattttgtaatattcctaatgttttctttttttgctcattggttatttaggagggtggtatttcatttccacatatttgtaaatttcccaaactttttttttggttattgttttttaattttatttcattttggtcagagaatatactttatatgttttcagtggtttaaatatattgggacttgttcgaaagcctaacacatggtctatcctagagaaagttccatgtcatttgagaacaatatatattttgccattgttgcttggaggcttgtatagatatttgttagatctagttgatttgtagtattgtagtcttctatttccttgctgatattttgtctagttgctttatccattagtgaaagtgggatagtgaggcctccaactgttattgttaaattgtctatttctcacttgaattctgtcagtttttgcttcatgtattttagggctctgttgttatttgcatatatgtttataattgtatttttttgatgaattgttggattttccctcttataaaatgtcttttttgtctcttttgtggtaacaatttttgtcttaaagtgcattgtatctgacattgtatagtttgctgtttgcatgatatatcttttccctttgttttgctttcagcctgtttggtctttgaatctaacacatcatttatttatttatttgtttgtttgtttgtttgtttgagatggagtcttgctctgtcgcccaggctggagtgcactggtgtgatctcggctctgcctcctgggttcaagcaattctcctgtctcagcctcccgagtagctgggactacaggcgtgtgccaccatgcctggctaattttttgtatttttagtagaggtggggtttcaccatgttgaccaggatggttttgatctcctgactttgtgatccgcccgcctcggcctcgcagagtgctgggattacaggtgtgagccaccgcgcctggcctttttcttttttttgagatggagtctgaccctgtcgcccaggctggagtgaagtggtacgatcttggctcactgtaacctctgcctcccggattcaagcaattctcctgcctcagcctcctgagtagctgcgattacaggcacccaccaccatgcccagataatttttgtgttttattagagacaaggtgtcaccatgttggtcaggctggtctcaaacccctgacctcaagtgatctgcccgccttggcctcccaacatgctgggattataggtgtgagccactgtacccggtcccccttaagattcattctaatgtcattttcttcgtgtagccttttctgagcctatggatgtgatccttccttgaaatgcctgtatgtctttgttcatgccttttgtatgctctttttattattttatcatggcatatatggttagtttcttktcttctctccttgctaagctactagttctttgaaggcagatgataaatcatactcatttatatgctcatttaatgtatgtaacatttaattgaaatgtatgagtaagaattttctaccctgtaaaaattaaataacagtacatggttgtacatgtgatatgtttttataattattggaaaggtataacaagacaatgaaagttcagttttgcccacagaaattgctattatagggctgggcgcggtggctcacgcctgtaatcccagcactttgggaggctgaggcggggagatcacaaggtcaggatatcaagaccattctggctaacacaggtgaaaccccatctctactaaaaatgcaaaaacgttagctgggtgtggtggcgggcgcctgtagtcccagctacttgggtgtctgaggcaggagaacggcatgaacttgggaggtggagcttgcagtgagctgcgattgcaccactgcactccagcctgggtgacagagcaagactccatctcaaaaaaaaaaaaaattgttattatagtgttttattttattttattttattttgaggcagagtctggctctgtcatctaggctggagtgcagtggcgcaatctcagctcacagcaacctctgcctccccggtttaagcaattcttttgcctcagcctcttgagtagctgggacttcaggcatgtaccaccacgcctggctaatttttttttttttttttttttggtatttttagtagagacagggttttgccatgttggccatgctggtctcgaactcctgacctcaagtgatccacccgcttcagcctcccagagtgctgggattacaggcatgagccactgcacctggccatagcagtggtttctgatcaaatatttgatgcccagcttttcatagagaacatcacaaaattccagctccaagtaattttgggctagaggcataatttcccacaacaaacatgggaaacctactttcatatgagagtgactaggctaaagcaaaactaaactggaaaatatacaggaaaggtagagctatttgccaggctactttctagcctccgtatatatctgttatttcttgagtccaaatctagttctccattcttaatctctcccagatgaaatcttcagggacttgcagaaagtgtgcaaatatgcatcctgctcatttttataagtaaagcataatggctacatggatttatagttttcttctgtcattctaattagatctgaggtggtcatgataggacaattctggagaaaatacagttcaaaagctgagtatatttttaaaaactatttgctaatgaaagccttataaataatagcagatggtcttaaatttacttcatttgcaccataattgttgcatacctggctttttgttcatgccaagcctaataatgactgggacgtaccatggtatacagtcagacctgggttccagcttggcaaataatttgccatgtagcagtatattaaggaagttttttattccttctgggcctcagtttccttatgtgtaaaattctagaacagaaatgttcctttaccttatkwttcgttgcagcaatgtaagggattgcaaaaaagattttgattcattcatcaacaagagtgcaaagtgatgatagaggcagatgaaatagactgatcaataaagggagtggattagaagagcaagggtcaaaggaaaaaaaaaggaggtgaactctgtatttttagttttttttaaatgtagtcaaaccatattataacactggaaccagaagaaaaaagtaatgttctaatcctaggaaagcattagctgtctgggcttttattgagaaagttttagcaggatcagtcaatgcacatttatcaagtgctcaatatgcttgtagtatattgttatatactatggagaaactgaaaaagataagatatagtcaatatgtcccaagaactcacaactaattatacttatagaatctaattacagccataattaccttattggcaatctaaaattcattaattcattcaaaaggctctagtttcaaggagctcacagcctactggaaaaacagacaaagtaaccatgtagtgtgagatgtgatatagggtaaatacaagggcactaggaaggacacytgtgtcgtatgtggcagagagctttcaggaaagctgcgcaggaaagatggcattaaagtggaatgttgaaggatgagtgagagtcatcaggcagagagacacgcaaaagctgcagtgcatgcggaggctcaaacaaggaagggatgcttcaggtggatgacagtggcactgggtgagtgtgtgggggtggtgggtgggtgggtggtgaaacaggctggggagcagacaagggctgggtcaggaacggccttgtactaacgttatggtgaggacttaatttttttgaaaaaagtagaaagttgtggaagaggtttaagcaagggagcatcataagtatatttgcattttagaaaggtcgttcctggctgggagcggtggctaacacctgtaatcccaatgttttgggaggccaaggtgggtagatcacctgaggtcaggagtttgagaccagactggacaacatggtgaaaccccgtctctactaaaaatgcaaaaattagctgggtgtggtggcacatgcctgtaatcccagctactcgggaggctgaggcaggagaattgcttgaacctgggaggtggaggttgcagtgagccgagattgtgccactgcactccagcctgggcaacagagtgagactccgtcttaaaaaaaaaaaaaagctaattcctgagacaagttagtgattcaactgatggaaagaagtcagaactcagaccatttaggaggctgtggagttcatatgagaaaggaagagggtgaggattaaactgattttttttccgtaattatcagcagggaaaaaaattgagggaaatcaagtaaagggagatgaaggaggaagaattgacgggactttaccagttactcatggagaggttaagggagaaactacataaaggttccctggttttaagcttgagaatcagagagaaagtggttcattgaccaatggaggaaagggaagagtaraagagatttactagggaaggtaggttccatttagtgttcgttgagtgtaacatgccggtgaacatccagatagaattgtcccttagcctttaaatgatcaagtctgagattgggatagaagtcttggttgcaaatcgatttgaatcattacagtgtaagtgagagctggctgcagatgaagcagggtgagtgtaggagtgtgagtaagggaatgcagtgctgtaaattaatctttggtcactgctttgtgatgttgcttttgaaacataagtttgaatacagagttgactttttaaaatctgggcttttctttttagtgtcattgattactgttagtattctaacagttaatatctgtaggactctttctttccaaagacttggaaaactgtttttcctctctgctatgaattttgtaattattttattgattgcagaatatctttttgaggcaatgattgaaattgcaaagtttttttcatcasttccagattactttctttctgtttattcatagttccttgtttcattttcgatgtttatttgttgactatttgctttatatcagatgactttataggtattttaaggggatttaagaaagatatcactagttacctattcgtctataaattccttgcttaggccaagtgtggtggctcacgcctgtaatcccagcactttgggaggccgaggcaggtggatcacaaggtcaggagattgagaccatcctggctaacacggtgaaaccctgttattaaaaaatacaaaaaaagaattagctgggcgtggtggcaggcacctgtagtcccagctactggggaggctgaggcaggagaatggcatgaaccccgggaggtggagcttgcagtgagctgagatcgtgccactgcactccagcctgggccacagagtgagactccgtttcaaaaaaaaaaaaaaaatttccttgctttgtattttatctggtgttcatgtatctgctgcatattaaataatgaatgggttttaatttgtgatttaaaggaacttaaatagtctagtgaggtaaactaaccacaatacagtggtatgtgtgctttgaggttacagaagagggaacaattgatttttgtgcaggaaagacgaaaaaaggcagtcagggacaggttgactgaggagatatgtgtaaaagagagaaagcggcatggtactggaggcagcmccatgagcagaggccaggcgtggaggggtctgatgtcaatggggaatgattctcagggggtcaggctgcatgggaggagtgctgggaggtgaaggtaaaggtggaagatgagcaggagacagtgaaggaagggtgccctgggcccctgttctttaaaagccccttcacatgtttccatgtgattgccccagcagtgctgtgagagagaacttgcaggtgtccctttttcctttgcattttgtctccagtctgtcttcttccttttgtaatttctactctaattacttgtgaagaagggtttgattatcattatctctattttgtggatgacagaactgaagcttaatgatttatctagtgccatgtgactaagaaaaaactgattccagactagagcccaggtcttctgactctaatacaccaggcttcttttacattaattcaatgccatcttctcttctactttttctattcagttacttttcattctaaaggttatgaggggctgggtgtggtggttcatgtttgtaattccagcactttgggaggctgatgtgggaggatcacttgaggccaggggttcaagaccagcctgggcatcataaggaggccttgtctctacaaaaaagaaagaaagaaagaaacaaaaaattagccaggtatggtttgcatgcccctgcagtcccagctacttaggaggctgaggtgggaggatcacttgagcccaggagttggaggctgcagtgagctatatgccattgcactccagcctgggtgacagagtaagaccctgtctcaaaaaaaaaaaaaaaaaaaaaaaagttacaagtttggtagaaaaatggcataaacttgagttaccgaataagaatatataatttgaagaaatttgctttctttgttcctcatcatgggtggtctaaacagattataaacatgaacttgatgaatctaaaagataaatagtttagccaacaatgatttcctgatttataggtctgagaagtttggaacttggtaacttcaattttttattttgttttatttcattttaactctttattatgaaaaatttcaaacatatccaaaatagagactgctatattgagccctcaagtgcccatcactcagcttcaacagtgagctcatagcagtctaatttcatatataccctccacacattcctgctctcagatatttctgaagcaaagccgagacatcatttcatttaacttgaacctttacagatgttttgctttagtttaacttgtgctcctgtctccatttgtgttctaggcattaggtccagttcttggtatgggtttttttgaagttcactgctcctttaagtagtgagtatcagctgactttcaaagattgtcagctgtgtataccatattcttcttgccatttgctactcgttagtgggtctggtgccagcccctaacgtgcagctaggaaaaggtgttcccatgttgatgctctgaccatgagctgacataagaatggctcttgcaacaatggtttcatttaggtcagatttgaagtctgtactgcatggcaaagctgtcattcaaaatcagtctctgtgcatttattcattggcaagttcaagcatgtgataaaattatttttccttttgctaacaggctagaagtaaatggagaaaccagatacagactggactttagtcagcaggcacagtggtattggctgttgctgtttgccacgttggttggcatcatgaatgggtatgagaggcaaggaactagtgattaacaaaggaaagacagcttttaggggcgttgttacattcctgtaatttatcttttgctaggacatgtccccagcatctctttggacctagaatatagccatgttcctgattataacagcagggtgtggtgaatgtgctcttgagtgtgtgtacctgggcctgtgtgtgtgcactgggtgttgggcatggccttgctggctgctgacctctgtatctctacttttgttgactgatcctgtttttggttagcaatcttagtttataaaatttgcaaatatgtaagtatagaaatgtaatgtcagcactctcttctctaaggcattatttctaggagtctatttcatttggcctgctgggaaagagcagttctattaatagtgattcctcagatacgtttattgcagtgtttcagtgctttttctctcccctggagataaaactgagcctgaacattctggkattctttttttttttttttttttttttttttttttgtgagatggagtttcactcttgttgcccaggctggagtgcaatggcacgatcttggctcaccacaacctccacctcctgggttcaagcgattctcaagcctcagcctcctgagtagcagggattacaggcacgcgccaccacgcctggctaattttgtatttttagtagagacggggtttcgccatgttggccaggctggtcttgaactcctgacctcaggtgatccgcctgccttggcctcccaaagtgctgggattacaggcatgaaccaccgcacccggcccattctggtattctttttagatcaaccttagctctataaatgtcctagttgagaaaatattgatctgctgtctgaaaatacagcaaagtggagtttaaaagtaatggaaagagggcctggcacagtggctcacgcctgtaatcccagcgctttgggaggctgaggcgggcggatcacctgagatcaggagttcaaggccagcctgggcaacatggtgaaacctcatctctactaaaaatacaaaaatcagctgggcgtggcggcacatgcctgtaatcccagctaccggggaggctgaggcaggagaatcacttgaacccagaaagcagaggttgcagtgagccgagattgtgccattgcactccagcctgggtgacagagactcagtctcaataaataaataaataaaaagaaataaagtaacggatagaggccatgtttgtgtgtgtgcatgcacacgcacacgtgtgtaaacacacatgcacacagtgttttagtatataagggtaatgatcaggccagcttttactgtacttcttaaatcaaaggactacctttttttagaatttgagaagaattagtatgaaggtgtgagtggagcctcaaacactatagtctcttatctagaaaaaggtacttcccagtttggttaggtacctgttttgtttttgtttttgtttttgtttttgagacggagtcttgctgtttcacccaggttggagtgcagtggtgtgatctcggctcactgcaagctctgcctcccaggttcacgccattctcctgtctcagcctcccgagtagctgggaatacaggcgcctgtcaccacacctggctaattttttgtattttttagtagagacggggtttcaccatgttagccaggatggtctcgatctcctgacctcgtgatccgcccgcctcagcctcccaaagtgctgggattacagacgtgagccactgtgccccgccaggtacctgtttttttgtaggttcagtatacactgtgagctggtgctctgctaagtatgctctggtagaggaygggacataggcaaatctctgggcttcaggcattcaacatcttttggactaagtaaaatatatatgatttgatgaatagtgacctttgaagaataggtaagatttagagaagtcacgaggagaatgtgctacttgggcctcagtttgtacatctataaaatgagagcattatacgtagatgatctaaagacccctcttaggactgattctgcaagttaagaaacatccaaagagagaaaattaggcttcacaagcgtaatgaaaactaatgagaatgtttttggagaagccaaaatccctttgttttccctttttggtatcccttacaaggcctttgatcatttacttgtattcagatatcttgaagggctatggaacatactctccccctattaattaacatacatttagcgaatgccttttaatgtttaatttaaaatacagcaaaaattaaaacttgaagagaatcactcaaatttgtgtccgttgacaactaacaagtatgcttgaatatatggcaaggtattctttgccctaaattatcccttagtaaagagggagttgccttcatttgagtccttatgaaatctctgaaggtgaggggtgccttctcaattactttgaacaacaaactactgttttgggatgataagctattatcatcaattagtgctactttttggatgcctatagggatttcctgacagaagcagtggaaaaacaggcggagaaatttaacacagtttggtgttggatgccttaaaataagctttttttttttttttttttttttgagatggagtctcactctgtcgcccaagctggagtgcagtggtgcagtctcaactcactgcaacctccgcctcctgggttcaagcaattttctgcctcagcctcccgagtagctgggattacaggcacccgccatgatgcctggctaatttttgtatttttagtagagacggggtttcaccatcttggtcaggctggtcttgaactcctgaccttgtgatctacccgtctcggcctcccaaagtgctgggattacaggcgtgagccactgcgcccagcccaaaataagcctttaagtgaccatttggaaaacaaataccaggctttcagcagaggaatggcacaatctttttgtttaattaattaattaattaatttagttagtttttagagctggggtgtggctctgttgcccagactggagggcagtggtgtgatcatggctcactgcggcgtcgacctcctggatatcagcaatcctcccacctcagcttccccagtccttttgttttataaaaacaaggacccctctggatgccgagttgagaatagactctaatgggcagcagtagaagtaaggatacctgtcagtaatcctggtgcaagatgctggcagtggtagtggatgtgttgagaagtagtctgattctgactgtattttgaaagtagagccaacagatttttttttttttctcagatttggatgttgggtatgagaaagagatgaatcaaatatttattaaatcctttataatcaagcacacttcaccctcccttacctaacaattcctcttctaaaatttagtttaagaaaacaatcgtgtgtaaagatgtttgtaaatacaagaatagttatcatagtaatatatcacagtaatgaagatttaaaaacatgcaaataataatggagaatcagccaaataaatgctggtaaatcctttcagtagagtactatgcaggcattaaaatgatctacaagtatgtttttggacaaggaaatgcattacaagtatatttccaggtttagtttttgtatgtattttgctgggaatttgaggtttctttttttgtttttcaaaattagttttcaatactgggagtattttaatgggaagtcattagagggtatcagaaactattggttgcttctttagtaatgtagaaggctttcatgttaacttttgattggtgaatattttgtatctctactttcaaaggtagttaccttgttttcctacaatcaaattgttgttaaggaaattttattttcttgctctctttcagcaaatcaactaaggtratttytgaaagaagttgaatcatttattacctgttgcattctgacatgtatcagaagttggcaagttaagtgtaatttaaaatagtacaaaattttatcaaaaagctttgccatttcagagtagttatttatcttccctcatgtatcatatatgtaaccccctaaataaatggaatatactagaagaatcattcctgtataactgtataaatggttgaaatgaaatcaaccatattggatccataagcttattggatccataagaacacttctctttggttcactgagtgagtttggtttgctttgttcagattttaaatcaatttttatttaagtgttcataagatggaaaatacaagactttttctaggatcattcctctgctataaattatttgcttcatatatttctatcacaccgaatctattatctgttcaatcacaaacattaattggaaaattgaggatcagaaactcctgttcttggttctctcctgccatctgtcttcctccttcccccagtgtttcccctcaaatctcttgtgattaaaaaaaaatttttgaaattactacataataaaatagaattttttatgcacagttctgtgacttttgatacatatattgagtcatgtaacagttacaatacagaatagttccatcatcccagttatatccctttatagtcacacagtcccctggcatccactgatctatagttttgtctttttgaggatgttttatgaaaggaataattttgagactggctttttttttttctgagacagtctcgctctgtcacccaggctggagtgcagtggcacgatctcgactcactgctagctccgcttcctagattcacaccattgtcctgcctcagcctccggagtagctgggactacaggcacccgccaccacgcccagctaattttttgtatttttagtagagacggggtttcactgtgttagccaggatggtctcgatctcctgacctcgtgatctgcctgcctyggcctcccaaaatgctgggattacaggcatgagccaccgcacccggctgagactggcttctttcacacagcataatgcctttgagattcatccaagttgttgcacatatcaagagtttgttcctttttattgctgagtactattccagcagtgaatatgtcacactttattcagattaactcattggataatttccagattttggtgattatgactagagctgctatagacatttatgtacaggttttgggtgaatagggtttcatttactaggataaatgctcaggaatgccattgttgtatggtaagtatatatttacatttattggactctgcgaaactctttttcacagtagatatatctatcattgggcattcccagtagcaaaatgtgggagttccagttgctttttatccttgtcagcacggttcagtatattttagccattctgttaagtgtttagtgattttttaaaacagtattattgagataaaatccacataccataaaattccctactatctaggtttagagtattttatcacttcaaaaagaaaccccatactcattactagtcacttcttgggaggccgaggcgggcggatcatgaggtcaagagatcaagagcatcctggccaatattgtaaaaccccgtctctactaaaaaatacaaaaattagctggrcatggtggcacgcacctgtagtcccagctgctcgggaggctgaggcaggagaatcacttgaacctgggaggcgaaagttgcagtgagctgagattacgcccctgcactccagcctgggtgacagtgcaagactctgtctcaaacaaacaaacaaaaactagtcactcttcatcttcccccaccctccagctccaggcaactattttactgtctacagatttgcctattctggacatttcatgtaaatggaatcatacagtatgtagtctttcataagtgactactattgtgtctggaattggtgggttcttggtctcactgacttcaagaatgaagccgcggaccctcgcggtgagcgttaagctcttaaggtggtgcgtctggagtttgttccttctgacattcggctgtgttcggagtttcttccttctggtgggttcatggtctcgctggctcaggagtgaagctgcagaccttcacggtgagtgttacagctcttaaggcagcgcgtctggagctgttcgttcctcccggtgggcttgtggtctcgctggcttcaggagtgaagctgcagatcttcgtggtgagtgttacagctcataaaagcagtgtggacccaaagagtgagcagtagcaagatttattgcaaagagcgaaagaacaaagcttccacagtgtggaaggggacccgagcgggttgccactgctggcttgggcagcctgctttttattcttttatccggccccacccacatcctgctgattggtagagccgagtggtctgttttgacagggcgctgattggtgtgtttacaatccctgagctagatacaaaggttctccacgtcctcatcagattagttagatacagtgtatcgacacaaaggttctccaaggccccaccagagcagctagatacagagtgtcgattggtgcattcacaaaccctgagctagacacagggtgctgattggtgcgtttacaaaccttgagctagatacagagtgccgattggtgtatttacaatccctgagctagacataaaggttctccaaggccccaccagagcagctagatacagagtgtcgattggtgcactcacaaaccctgagctaaccacagggtgctgattggtgtgtttacaaaccttgagctagatacagagtgctgattggtgtatttacaatccctgagctagacataaaggttctccacgtccccaccagactcaggagcccagctggcttcgcccagtggatcccgcaccggggctgcatgtggagctgcctgccagtcccatgctgtgcgctcgcactccgcaggccttgggtggttgatgggactgggtgccgtggagcagggggtggcacttgtcagggaagctggggtggcacaggagcctatggagggggtgggaggctcaggcatggcgggctgcaggtcctgagccctgccccgtgggaaggcagctaagtcccagctaaggctggcactgctgggggacccagtacaccctctgcagccgctagcctgggtgctaagcccctcattgcccggggccggcagggccagccagctgctccgagtgcggggcccgccaagtccacgcccacccggaactccagctagcccgcaagcaccacgggcagcactggttcccgctcgcgcctctccctccacaccaccctgcaagctgagggagccggctccagccttggccagcccagaaaggggctcccacagtgcagcggtgggctgaagggctcctcaggtgccaccaaagtgggagcccaggcagaggaggcgcccagagcgagcragggctgtgaggactgccagcacgctgtcatctctcactatcacttaacatctttaagtgatagaagtggatgcaaggtttatccatgttgtagcatgtatttgttcttttttatggctgaataatactgtattttgtggatataccacattttgtttatccatttatcaattcatggacattttggttgtttctactttttggctatgaataacaatgctgtgaacataggtgtacaaattcttatgtggagatgtgtttcagtcctcttgggtagaactgcttgatcacatggtaactattttttaatttattttgtttcttattaaaaaaawtttttttttttttttttttttgagacagggactcactctgttgcccaggctggagctatggtgtgattatggctcactgtagcctcaacctcccaggctcaagtaatcctcccacctcagcctcctgagtagctgggaccacaggcacgtgccaccatgcctgattaattttttgtttgtttgttttttgagacagagtctcgctctgtctcccaggctggagtgcagtggcgtgatctccactcactgcaagctctgcctcccgggttcacgccattctcctgcctcagcctcccgagtagctgggactacaggcgcccaccaccatgcccggctaatttttttatgggtttcaccatgttagccaggatggtctcgatctcctgaccttgtgatccacctgcctcggcctcccaaagtgctgggattacaggcatgagccaccgcgcccggcccatgcctgaatagtttttaaattattttttgtagagatgaggtctcatactgtgttgcccatgcttgtctcacactcctgggctcatctcccacatcagcagtaactctctgtttagccttctgaggaaaactgtcaatgtgttttctaaagtggttgcaccattttacaatcccttcagcactgtatgagggttctaatttaaccacattttatcaacatttgttactgcccatgttgtcatctagtgggtgtcaagtggtatctcattgtgattttgatttgtattttcctagactgatgatgtggagcatcttttcttgtgcttattgaccatttgcatatattctttggggaaatatgtattctgattctttgcccattttaaaattgttatttatctttttattgttgaattgtaatagttttttacgtgttctggacacaaatcccttctcaggcatataatttgcagatattttctcccattttttggtttgtctttcactttcttggtggtgtcctttgaagcacaaaaatttttaattttgatggagtccagtttatccatttttggtggtgatgtttgtacttttggtgttgcgtctaggaaaccactacttaacccaaggccatgaagatttacacctttgttttgttctaagagttttatggttttagcttatacatttaggtctgattcattttgaattgatttttgagaacagcatatggtaggtatccaacttcattcttttgcatgtggatatccagttgcctgagcaccatttgctgagaagactcttatttcctcactgaattgtcttggcacccttgtcaaaaatcactttcccataaacatcgtatttccagataattctgttctattcatttatgtgtccatttttatgccagtactacattgtcttacgattgtagcatttagttttgaaattgggaagtgggggtcctccaactttgttcttttttaagattgttttggctagaatgagattttataaacataaattggagaaagtaactccatgcatgaaatattcaaatcagtgatacctgactacgtctatcataaaattcatatctttaacttgacctacaagatttgtgatctgacctctgcccagtttgacctttcacccactttccctcttggtcactgccttgcagcttcattggcctacttcctgcttctttttttttctgagacaagagtgtctctctctcacccagcatggagtgcagtggcgtgatcttggttcactgcaaccttcgtcttccagattcaaacaattctcctgcctcagcctccggagtagctgggattacaggcatgtgccaccacggctaatttttgtatttttagtacagacagggtttcaccattttggccaggctggtctcaaactcttgacctcaggtgatccacccgccttgacctcccaaagtgctgggatcacaaacgtgagccaccatgcctggcctacttcctgcttcttgaatgcgttaaaacgccttcccgttacatggcttttgcatatctacgtactttttcttggaatgctcttcccttcactaattcctactcattcttcaggtcttagcctaaatgccattttaaaagaaagactgttctttttatttttaaaatattgctttatcttttcctagttagaaaagcaacatacaagttctttaaagcaagcttgaaaaataaaagcatggctacacacacacacacacacacacacacacacasacacacacacacacacggaaaccataggacaagcatttaatgtttcagtgccatcaaatgtcagcttgttattggtcgtttgggtttttcattttttctgtttggaagcctgcagaatttttcgtgcttggaattgccaagatgtgtccagattgggtctgttaccatttgttttgctctatggatgtatagatccttacatctatagtgtctgtttacattcagggaagttttgtttgtttgtttgtttgtttgttttttggagacggagtctcgttctgtctcccaggtcggagtgcggtggcaggatctcagctcactgcaagctccacctcccgggttcatgccattctcctgcctcagcctccccagtagctgggactacaggtgcccgccaacacgcctggctaattttttgtatttttagtagagatggggtttcaccgtagcaaggatggtctcgatctcctgacctcatgatctgcccaccttggcctcccaaagtgctaggattacaggtgtgagcctccgcgcccagccggaagctttctttttttgaatctgtaatatggttttactttctttaaccaaaatgttattgtataataggatcgactcttctctgttttctacattattctcttttcttgccattgtttccttttctttctacctggctccttttgaattgaacattaggatatcatcttaagtgtgtcttttaacataatggatgcaatgttctgcatagatttttttttttttttttttgagacagagtcttgctctgtcgcccagactggagtacaatggcgcgaactcggctcgctgcaagctccgcctcccgggttcacgtcacgccattctcctgcatagacattttaatgctatattgccaccaattatcttaatacttttttctttgcagttttttcttattaagctgatattttaatctcaacctagtctttgtgattctttgttgaagctttatatagtgcctggcacaaaactatgtgctcaaacatatattgaatgaatgattaaaagagtatacacatgaataaataagaaccagttcttagttggtgtattctactgagactgtcaaagtacttctctagtaatgaattccttttttaaaaaaaagctgtattgaagtgtaatttatatatatagtatgtgaacttccaaaatctgagacaggtatcagttagtttagaaagtttattttgccaaggttggggaacacgcctgtgaagcagcctcaggaagtcctgatgacgtgtgcccaaggtagttgagatacagcttggttttatacattttagggagacatgagacatcaatcaatatatgtaagaagtacattggttccgtttggaaaggtgggacagctcgaagcaaaggcaggaagacttgaagcggggaaggggcttccaggtcactgataggtgagagacgcacagttgcattcttttgagtttctgattagcctttccaaaggaggcaatcatatatgcatctatctgtctgactgagactgatacctgtctcagactttggaggttcacatactatatatataaattacacttcaatacagcttttttttaaaaaaaggaattcattactagaaaaatactttgacagacagtgagcagagggatgactttgaatagaatgggaggcaggtttgccataagcagttcccagcttgacttttccctttagcttagtgatttgggggccccaagatttattttcctttcacaagtatgagggtgtaattcaataattttttagtagattttatagggttgtacaactatgacaacagttcagttttagaacagttcagtcaccgcaaaaagttccttcatgtaagcttgcacttaaatccctgctttttcactctgtctctataaatttgccttgtcatttaaatgtgtgcttatgttgctctcatatatatatgtatatacacacacacacttttaggattgtttatatctaaacaactttaatgaagtatatatagtgtaaggtatatgtactttatttaagtatatatacttaatgtatatatactgcctttgctttgagctgtcccacctttccaaacggaaccaatgtacttcttacatatattgattgatgtctcatgtctccctaaaatgtataaaaccaagctgtatctcaaccaccttgggcacaggtcatcaggacttcctgaggctgtttcacaggcgtgttccccaaccttggcaaaatagactttctaaattaactgatacctgtcttaggttttggaagttcacatactatatataaattacacttcaataaagcttttttaaaaacaagtgtgcacacactttataattgttttcatttttaagcatggctttctaggagttgccttcctgtctgcatagcttagtgatcagtggtcacccagtgcttggacagtggttgcctcagacatcttgagccagtaaggcatttgtcctctgccagtagatctctgtgggtagggagcacatacaaagtttaggctttttcagatctgctgtcttttactttccacccagtcctttcatgtctcctctgtgcctgcatgccacttctgggttggccaacaaatgtgccccacccagactgcaacctccaccttctagagctgttcaccctctcactcgcctcccacctgctccatcacttactctgacagtgcaggtggtcatgtgcgttcttccccactccaaactcagtgaactgtcagtcctaatggtttgccttgccctgctctgccttgcagaacctctgtacctactgaatgagtagatgaggtgggagtaaccttacacagaccctcattgttcttacccaccttttagcagtttttcaagcataaatgcttctcaggttgttgtattcttctggtggatttccagagcactgaaagggttgttttgcccatttcacccagctttatcattggtttttggggagaggaattaactaccttctcactaggctgtagctggaagtcttccctctcagaatgtattttttagtgtagttagtcatttccccaggtatatttactgtatccttagggttctccagaaaaacaaaaccaaacccctgtgttagggttttacagaaaaacaaccagtagtcagggtaaggcaaaccattaggactggctgctttgctagtgggttggaagggatctcactgaatttagagtggtgggtaacgcgcatgcccactctgtatatggggaggggtcgggggtagggagagaaagagactgattttaaggaattcacttatgcgattgtggggctttcaagtctgaaattcacagggcagttgggcagagatgagttgatgttgcagtcttgttcccggaccaaactgagggtcgggttgctgtttcttgtggcccaataacgagatgcagatgaactggggaggaagagagtttttatttctgtaactgttacagggaggcctggaaattatcaccagaccgacttaaaattacaaagtttttctgagcttatgtaccttctaacctatatgtctgcatgtaagtgtgcattcatctgaagatgtaagtgattaacttcttttaatctgtaactaaagtctgagtcctgaagcccttcttctggagcctcagtaagtttacttcatctaagtgggtctaggttctggggtgattacccttatcttatctcctgctaaatcacggagatttggagagttccttcagacctccaataaacttgtttgtggaggcctggggagtttcttcagacccctaataaaacttgtttaatcctaaatgggtcctgttaagaattccttcgttattttgtcatgctttaaggcccaggaaaggcctgggcaaaactcttggtgcgcttttgttacattccagcctttgtataacagcactggcttttttttttttttttttagcttttaatatttaacttaaccactcagtcagtactgaaacagttgttatggaggcctgcgttagtgagacctggcctgccacagtcttaactccagattctgctcggtagcaggctggacacacaggcagggtttctatgttgtagttcttttccaggaaacctcagtctttgctcttaaagcctttacctgttagatgaggccttcctgtattatggagggtaatccactttactagaaatctgttgatttaagtgttaatcacatctaaaatataccttcacagacatatctagattggtgtttgatcaaacaactggacaccaaagtctagccaagttgacacataaaattaactgtcacacttgccttctgaggattcagggtaaattattttggtgtacatgtagtctggttgctgtctgtttcccactgtatacccttgctctagctaaactagcagctccagctgtttcatatacatgcttctgcttttgcacatccatgtctttggtcatagtgtacctgcagcatggagtgcttcctgtgtccagatcttacctgtccttctgaggattagatcacagatacttatacatacaattttgtttgcagcctatacactagctttcctaaacttcttcctgtcacctaattatgctgtgttctgtcttgccattgtgcttttgcacacaagttcctttggtttagaatatccctccctctgtcttttctttcttaaagagacagggtctcagtgtgggctggtctcgaactcctgagctcaaatgatcctcccatctcggtctcccaaagagctgtgattacaggcgtaagctgctgcacctggtccttccttcctactttctgtaaaacttttacagcttcctcaggtcaattacatgctccttttcattatgctcccattgtccctttgcgtatttccacggaggcactcatcacattttattgttattgtttacatatctgtctgtcaaaaggctttgttttccaacagcagaagttactatactgttttccttttcaaagttggtcctcagtcgagcctatctggtctgtagtacctaaataaattgtgggataataaactgaatctctgttaaagatttggaagttgtttcatatttcttctataatttctcattgttagaatgtggagataatgactgcttggagrtaaagcaagtctgaatagcagagatcagccttgggttggactccagacattcttgggcttrttaaatatttggttgactcactgatagaaatagttttatttattttccattctttaccaggtacatagcttcaaaattacttcattaacaaaagctgtttctgattataaacattgatttatttttactcaaatttgtatatactgtatatactgagtaaaacaaattttactcatttgtttttgttttgttttgttttgttttgtttttttgagacagagtcttgctttgttgcctaggctggagtgcagtggcatgatctcagctcactgcaagctctgcctcctggattcatgccattctcctgcctcagcctcccgagtagctgggactacaggcacccgccaccatgcccagctmattttttttgtatttttttttagtagagatggggtttcacygtgttggccgggatggtctccatctcctgacctcgtgatccgcccgcctcggcctcccaaagtgctgggattacaggtgtgagccaccgcgcccggtctcaattttgttttaagaatatcaaagaatccaagactgtttcagcttctttctacctaaaatgcagtggtgataactggtgactgatttgtaagcaatctcaatgtaatgataaataaccttttcctttctctactagatgttggttatctttctgaagtagactgtccatggcctgaacattttccgaaaatcattttgagcaaaatatctgtttaataacaagataaccacatcaagatggttggaaagctgaagcagaacttactattggcatgtctggtgattagttctgtgactgtgttttacctgggccagcatgccatggaatgccatcaccggatagaggaacgtagccagccagtcaaattggagagcacaaggaccactgtgagaactggcctggacctcaaagccaacaaaacctttgcctatcacaaagatatgcctttaatatttattggaggtgtgcctcggagtggaaccacactcatgagggccatgctggacgcacatcctgacattcgctgtggagaggaaaccagggtcattccccgaatcctggccctgaagcagatgtggtcacggtcaagtaaagagaagatccgcctggatgaggctggtgttactgatgaagtgctggattctgccatgcaagccttcttactagaaattatcgttaagcatggggagccagccccttatttatgtaataaagatccttttgccctgaaatctttaacttacctttctaggttattccccaatgccaaatttctcctgatggtccgagatggccgggcatcagtacattcaatgatttctcgaaaagttactatagctggatttgatctgaacagctatagggactgtttgacaaagtggaatcgtgctatagagaccatgtataaccagtgtatggaggttggttataaaaagtgcatgttggttcactatgaacaacttgtcttacatcctgaacggtggatgagaacactcttaaagttcctccagattccatggaaccactcagtattgcaccatgaagagatgattgggaaagctgggggagtgtctctgtcaaagtgagtagaagatacgttttttattttgactctatatttagctaataatgatctatacatatgtatgtatgtgttttatgtatatatgtgtgtatgttcctgtgtgtatatatagaaactgaagaccttttctggaacagatacagcttcattgatgaggtttctttttttattaattctctactagtttattacagatgttcacttatttatacttcattttttcatttatatatcgtggccctctttatttgtttgatggatacaaacccaccttacaggcggtgaaaagccttcttcagggtctcagaccttaatgccaatcattcagttttagtggcttctgatttctaatttctagatattgttgttaatgaggatagttggcttttgtgtggattaaggttaaaatcaggaagtgcatatatcatgttaatgagcacatagtgaattataagcattttgaaatttttagtggtagagaaaaataaaagcttcgtctaacctaatctcttcattttatggacaagaagactgagtcacagtaagattaaaaygatttgttcagatttagatggcaaggccagaattcgaatctgtgccttggtctcaatgaggtcgtgcttttctccgtggcattttactacgtgttgtgcttcctttgtcatctgaaggatataacctctcttattttttacaaaaggctagagaatctccaaaatttggaagcctaatccatacaagaagttccttggattcaaaacttctcaaatgatgatttttagcattttgcttcttttcttatgaagtgacaactagtataccctctaacctgtcttgatgacttatatacctggaatgaggatataaaaatggaaactactattaaattcaggtagcatctcttcatgaagaagagttggctataactaaattttatttttgttttttttcttttatcaaagtaatatataacacctgtaaaaaagaaatatataaggtgttatatatacatatataaaaagaaatataaaaggtgttatatatactttttatcaaagtaatatataacacctgtaaaaaatactttccttgtgtgcccttcttactttcaccaaggaatatctgcttaatttttttttgctgtatagaacttgtatagtaaatagatttcttatgtagataatctcaaaggaacagctgcctgcctgtaccaagctttcaattattgattataagttatgacataccatcattgtagtggctctaggttgtttttattgattcaaagaaaatttcagctctggctactctgattgcagtttattattatttccagataatagactataattgatttttaatcacctgtattaggtatttcagtctttgtgcttgtatgttggcccggcaccgatgccacctacatctgctaatataaaaggaggccattagaccaccagcctcttcagtagggattaaagagatatgcttaagttaaattttggtgctaatcaggaagagaacattttgtgtatatacttgctatgtttaaggtaaacataaaggccaagaaaattcatagaaattatattatgaattaatgaattttagaaagtaaagagatgttacttagcatttcagtatgtggaatggaggccctgtaaggctctatgttttttcaaaaattaacatgtcacaatcatgagtagaacctaccatgcttattccaagatttttgcatttggggtctttctagtttggggctattatggatcaaagttgctaagaacgttcttgtacattacttttggtggatatagcattcatttcttttaggtatataccaatgaatagaattgctggatgacaaggggtgtgtgtgtgtgtgtgtgtgtttgtgtgtgtgtgtgtgtgtttaacagatactttctaacagttttccaaagtgtctctatcattcatgtatggctgtactgtaaatgaacatgttctagttgcctcacatctttaccaacacttggtattttagtcttttctggtaggctacaattgttttttaaaacttaaaagcaaaataatatttgaacccctttttgaaagaaaatcttacccagaattccaatataaaacaagagctgctttggttgaggtgagtctaaactagaccatatttccttcttttgtttttgagatggagtctctctgtgtcatccaggctggagtgcagtggcatgatctctgctcactgcaacctccatctcccaggctcargtgatcctcccatctcagcctcccgagtagctgggattacaggcacgcatcaccatgcccagctaattttttttttttttttttgtatttttggtagagccccatgttggccagactggtctcaaactcctgagttcaggcaatccatgtacctcagcctcccagagtactggggttacaggtgtgagccactatgcctggccagccatacttcttttttaaagattgaatccctactctcaaaaactgctttttggggaataaggcagaaaatacaaaattattacatagtgccaagttgtaaatatcccatgttcattataataaagaatttattgcccacagtcagtcatcctgtgtgcttttcgttttatttaaacatttttattctgggaaatttttttttttttttttttttcttcgagacggagtcttgctctgtcgcccaggctggagtgcagtggcatgatctcggctcactgcgagctcggcctcccaggttcacgccattctcctgcctcagcctcctgagtaggtgggactataggtgccccccaccacgcccagctaatttttttatttttatttttagtggagacagggtttcgccatgttagccaggatggtctcgatctcctgacctcgtgatctgcctgcctcggcctcccaaagtgctgggattacaggcgtgagccaccgcgcctggccgaaaattgtttaaagtaaatattttaatacttagttcagtattacttagtattacaatacttaaatatttaggcagccttgaaggtttgaagatgtcaccagatggcctagggatacttgtagaagctgttgaaaatagagatatcaggagaccttcacagttctgcctcttatcttgttaatttttgagagttaacctttactttgcttagaaatttccagttatttacagtcagggtggcatctcttgcgtctctgggctgttccagttacagaaaagtcagaggctcctgctcaagtatcttgaaaagaaagcagaagtaaagtttgaggctatttacgttgccctcttctcatggtttgtggaattttttgtggaattttagttgtctccatcagggaacttttgggaagttacaagagcgtacagttacttctgttattaaactcattatgataccatgaaattacgtggaacaaataaaagtcaagtttgctaggtcaaaagagcaaatccagaaaagcagattaatgtaacagtgacgcttagacaacaagtacaggaatcacaactacaattcagagacgagttcttatctacacttagggcagaaagagaatatagcaactattaaacacaaataaattagaatgaaaaagataatagtagtgataagtacaagagaacaaataagaacatgaaaactgacaccctacagcttctaataagtaaagcagacaaaaaatcctctaaatcagatcaaaagcaaagaaagactgaataaatgagtgaaaataatgtaaaaaggtttttggaaatggagacatttttgaggaagtaggaagaataattagtaatttattaaattcataactttctttttaatatagaaagtgaaatttagttttgttaaagaaaaaattattcagtgatacctgctaaggcatgaggcagtgtttatttagcaccactgcaggaggtacagggaccactgcagtcgggtcttgcagtggggaatagagattggacttaactctgaatacagcatgggcaagtgagaatttgtagccagagagtaaggtgagggtcagtggatggaaaattactacgaggaaacatcaggggtcaggggcattctggctaaatttacctgataggattctcactgaagacaggccggggtgatcagacatcacctggagggtggtggaggatgagaaacccgatcagatcctgagagtgattagatatcaagggtaggaggttcttgctaaactgccttagcagggttctttgctaaaactggattttataaagaagtgcacagatggtcctaggagaaggttcaggagcctgactgaagtttggtcacacaaagaatctttgtcagtttggaaacttaaaattcttatgtcttatgggattaacagaaagataactcaatagccacttgaaattcttctgaaatttaaggataacaagaatattttgagcaagtgaagagaatgacagaccatattcacaaagatatgagcattaatagcatggaaaattaacagcaggcaaattaggatcacctgagctctactagctcagtctgaaatatcccagaagaattttataaatattacatgtggtgttttgtttttgtttttgttttcatgaagctatcagagaacaagtctgtttatttgtgaaaacttctcctttgtgaaggcactgcctaaggatgctattgggctattggggttgtgtcttttttggttttttttttggagacagggtcttgctccatcacccaggctggagtatagtggcaagattgtagctcactgcagccttgaactcctgggttcaaatgatcttcccaccttagcttcctgttagtagctgggattacaggtgcatgccatcatgcctggctaatttttttttttttttttttttttttttttggkggagacagggtctcactatgtgttacccaggctggattcgaactcctggcctcaagcagtcttcctgccatggcctcccaaagtgctgggattaccgctgtgagctgccatgcccagcctccttttacaagctatattgaagagagaagtgactgagacatcttagctggagaggaggaattgaataaacaagggatacaagtgacagagtaaaatgggctgtgaaaggaaatcagagagctgatgaaacattgcatttcaaagtgtgtcagggaaagattgagaagaagcagaaccagaacatgaattaataaggcaacatttgtacttttcttggagaatatagcaattggtagcaaaaattagaagttggatatcagatcatttattagtttgattagatttctctacaaatagtagagatccaaaataacaaagatttccaaataatgactactatgtagaaggcagaccagggctgctttgtcagctttgcagtcatctggcatttaggctgcttccagcttttgtctccatcatccccaggatccaagttggagcgccagtcatttcatctacattctaagcagcacagcaggggtggatgtgtgtaaaacaaatggcgtttagtattttttgaggatatttcttagaagcttccaggtagtacttcttgcttttcactggccataactggggttccttttactaagaaaaatcaattggatattgggataggcagatagtagtctctgctacattattgagcacctactatgtgccagacactgtgttagctccttgagataaaaggtctttgccttaaaggaacatatgatctaatagaagacttagattcatatataatgcagggttaagaactatggtcaccactgcttcttcattggtgaataattaaaaacaaacaaaaagaggccaggcacagtggctcacacctgtaatcccagcactttgggaggctggggtgggcagatcacctgagggcagtagttcaagaccagcctgaccaacatggtgaaaccccatctctactaaaaatacaaaaattagccaggggtggtggcccatgcctgtaaacccagctactcgggaggctgaggcaggagaatcacttgaacctgggaggtggaggttccagtgagctgaggtcgtgccactgcactccagcctgggtgacagagcaaaactctgaacaacaacaacaacaacaaagaactatggaaaaccaaggagaggtgcctaacccagtctgaggtgttcagagaggtcatcttgggcaatgtgtcatgaaactgagccctaaagaagggtttcctcaagcttggtatgacattttagtcagataattatttgttgtggcagccatccaagatgatcaacagataaagggaagcgcatttagttttgacttagggaatattgtgctccctgggtgacccatggttaaggcgctgtagttcttccttgactgtccagaatgtctttccttttccttagccaatgagccacccaagaaatgttactcctgggagaagcctgtgcctaactgtggtttacagaattcaaagggaagaggtagtatggaggactccttgtggcttcactcctggcccaacccagggcctcaaaaggacctaaggaacaactacgccctgttatgcctgacctatggaccctaccctcttgaccatataatggaagtcagctaagcttagtcccacctggacctagaacatggtgtttgtttcccataggtgaatatatttttgaaaaatatatttttgaaaaataagtaaaacaaaaccaaatcaggaaataatcattgagaagttacaatatgaacaccttaacaaagatgagtaacaatgtggtgttttttgctagagagttcatttccaggcaggaagtagtgtgaaacaaggtttgagagaaatgatgcggaccaggctttggagggccttatattttaagctaaagatattgaattttaagccagttgccttcagacttctcttattagtggagcaccctttttttcaagtgaaatcttgttcggaaccttggtagatgatgtacttggaagtgaagtggccctcctttaggcagcatttaattttggttggatttaacaaagaaaactgaagtgaagctcatggaattgcaaaactacaattttgtttttaaaagaaaaacattgattgtaatgtgtaaaatttacaaaactgatacacttttaattgggattatattggtttataaaaacatttagtgttttttttttttttttttgagacagagtctcgcactgtcttctgggctggagtgcaatggcatgatctcggctcactgcaacctctgcctcacgagttcaagtgactcttctgcctcagcttcctgagtagctgggattgcaggtgcgtgccaccacacccagctaattttttttktgtgtgtgtgtttttaatagagatggggtttcaccatgttagccaggatggccttgatctcctgacctcatgatccgcctgcctcggcctcccaaagtgctgggattataggcgtgagccaccgtgcctggctcaaaacatttagttttaataggcattttagggtatgtcttagtccatttgggctgctataacaaaataccacaaactgggttcttacaaacacagaagttgatttctcgcagttttggaggctgggatgtccaagatcaggcactgatggattcagcatctagtaagggcctgctgtctggttcatagatggcaccttgtgtcctcacatggtaaaggaggtgaagaatctctccctggcctcttttgtaagtgcactaataaggacacttcccaagttcccatctcctaatacagtcacattggtgattaggttttaacatgaatttggggggacacaaacattcagtccataatgaggtataaaacttagaagattcctgttttttttaaaaaaattcttttttttttttaagatttaaaatgtaagcctagttcagagtattttgccaagatgaagtgtagggcaaattggatctttaagtagagtaacctattacattgattaactactgtcaaagaaaagccaagcacatcaagggaattatggttggtacccatccagatattatacatgaattcatggttcctccttggtccttttctgaattacctgtctaatgaagaattatttcattgtttttgaaaacatccttacatttcctcattgctgaaaatcatgttttcaaacatcaaccattcatcacaatcacatacagaacctttaaaagacctaaaatttctgattcaggaggtctgggataggcccaagaacttgcgcttctaacaggtttcccggtgatgctaatgttcctggcctgatttcactttgagaaccactgcttaaaatcatgctacgttttgtttgcttcatttgtggactcagactttcttgcccctacagcctgggctgcagccacactgaaataattgtagctacaattattgccacaccatttatttaatcagttcctttgaatgtgttgtttcctgtgcctgcaacacctttctctcacttcatttcttcatctgaccaactcatggttgtatttcaagatttagttcaggtttcctttccctaaggaagatctctccaaggcccccctctgtctgggatgtacttcctatgctttcatgagacacttggcaaatggaaaagggttgatactttgaagctggctagactttgtttaaagtctttcattgacactaactggttttgtaacattgcatcaaatactatctctctccgtgtctccattttcttatctataaaacagggaagatggtgatgatggtaatgataccatccaacatctactgaacatttgttatgtgccaggcagtatgctgagctctctgtgtgccttatctcatttagtttttatatttaccctttcacactcacccataggtgccttaaacatcttaattttatagatgarggacttgaggctcccagaagttgaggagcttgtcctccgtcccacagttggaagatggtagagccaggctgtggactcaggtctttgtcttcatctatacttttagctcttgttgtatatacttacagcatttatgaagacaaactaaaacagtgtgacagtggctaagcacacgttttagagtcagacagacataggttcaaatcctagcactgtcctttattgattatgtgaccttgagtgagttatttggttttgtctagtcttggttatctcatctttcctttagttttcttatcctggaaatgggaatgataatatgttagatcccccttatctgcagatgatatgttccaagaccccagtggatgcccgaaaccccactgatggtaccgagccctatatatactatgttttttcctgtgcatatatacctgtggttaatttataaatcaagcacagtaagattaacagcagtaactaattataaagtagaacaattataacaatatgccagtattactacttttgagctttatggccatgattaagttaaacaagagttacttcaacgtaagcactgcgatactgctacagtccatctgataacagagggctactaagtgactaatggtgggtagtgagtgtacattgcatggacgtgttgaacaaagggatgatttacatcccwgtctagacagagtgagacaatgttagatttcatcatgctactgagaatgacatgcaatttaaaacttatgagttgtttatttctggagtttcccatttaatgttttcagaccacagttgactgcagagaactacctgaaactgtggataaaggcttactgaaatagtatccattaaggatgataataataactatccatagggttgtcgtgaggatttagttagaatgactataaagcccttagccaagtgcctggtatataatgagaggttgaaaatgttacctgttgtctttattattataataataaggatgataataataccgattgcagatgatggtaagtagtatttatagagttgtgagaattaaattactacaaagcctttagaatagcacctggcacatagaaattgttcaaagtggtacttattagtatgttatttttattgtcgaacgcttatgcactgttcccctccctctccccatcccaaaataatgagtgtgaaacacctaggttagtagcaagtgcaccacaggcttttgttaatgttcttacacatgctcctgtaagcttgtttagggcaaaggtagtcttgaagtcatgaaatgtttgtctcaatgaagcaaagtaagcacccgatttgaatagctctagtaggaaactaacatggcaggttgggaatgctggcattacagtaacaataatctctgaaactacttggaggtgacctttgatatttcattgtcatgttttccctttttcctttgtttctttgtttagtttgcctgttggtaaactttatataaatgggatcatggtctgtgtttttttcggtcaggttctttttttttttctctggcctaacattttcttttgagatttacctgtgttgtggtatatagctatatcatcagttttaattgccaaaatactattctctggtataatatagattatttatacatttttactattgatgaacatttggattgtttttagtttggagctaaggacatttttgaaggtgtttccttcaagagtttctctaagatatacactttggattagaatagctggattatgagcagtatgcatattccacttgtttttcttttttgttttttgagatggagtctcgctctgtcgcccaggctagagtgcagtggtgcgatctcggctcactgcaagctccgcctcccgggttcacgccattctcctgcctcagcctcccaagtagctgggactacaggcgcctgccaccacacccggctatttttttgtattttttagtagagacagggtttcactgtgttaatcaggatggtctcgatctcctgacctcgtgatctacccgcctcggcctcccaaagtgctgggattacaggcttgagccaccgcgcccagccttttttttttttttttgagacggagtctcgctctgtcgcccaggctggagtgcagtggcgcgatctctgcccactgcaagctcacaccattctcctgcctcagtctcccaagtagcagggactgcaggcgcccaccaccatgcccggctaattttttgtatttttagtagagacggggtgttagccaggatgatctcgatctcctgaccttgtgatccgcccacctcggcctcccaaagtgctgggattacaggcgtgagccaccgtgcccggccagtagcttatcttttaacttcctttttaatatcttttttgtcaatgacctcactttaacagaattaagaaaaataagaaaaatcttttgatgaatttaagttttaaacttgtatttaccaatctttttctttagaattttttgtaaaaaaattcttccatactctgaggtcataaaaatagtttcccatgttttttccaaaacttaaaacaaatttcttttcatgttaatctggaatttattaatcaatatggaatttattttcttgtgtgaggtgcagattcattttcatattttttctataaagatgaccagtttcccggaaccatctatggaaatacagtcagtactttggatccatgggttccacatccatagattcaactaacctcaggtcaaaaacattcaggggggaaaaattccacagagttcccaaaattacaacttgagcttgccatgtgctgaatactacattgaatctacgtgaatgaagtgatgtgtgggcatcgttaggttaggtattataagtaatctagagatgatttaaagtataagggaagatgtatgtaggttatatgtaaakactgtgccattttatatgagagatttgggcatctgtggattttggcatttgtggggagtccagaaacctaggggattgtcctaatgacatgcagtaccagctaggttaaacatcaggtttccatgtatgcattattcttttagtgagatcgctttcttttttttttttttttttgagacagagtctcactctgttgcccacgctggagtgcagtggcacgatctcagctcactgcaacctccgcctcctgggttcaagcgattctcatgcctcaattctcccgagtagctgggactacaggcgtgtgccaccatgcctggctaattttttgtatttttagtagagacgggatttcaccgtgttaaccaggatggtctctctctcctgaccttgtgatccgcccaccctggcctcccaaagtgctgggattacaggcatgagccactgcacccagtcaagaaatccttcttcacttagtctatcctaatgccatataccactctattttaattactrcagttttagaaaatgtcttcgagttagccaggcgcggtggcttatgcctataatcccagcactttgggaggctgaggtgggcggatcacttgaggtaaggagttataccccagcctggccaacacggtgaaacgccatcattaccaaaaaataaaaattagctgggcatggtagcgggcacctttagtcccagggaatggaggcagaagttgcagtgatccaagattgtaccactgcactccagcctggttgacagagtgagactctgtttcaaaaaaaaaaaaaaaaaagaaagaaagaaaatggcttagaatctaatagggtaatctccctgcttagttcttctctaggaatgtctaggctgtttttaaaccctttggtcctccgtatatattttaaaatcaacttgcctgatttcatgaaaaatcagactaaatttacattgaacctgtaggtaatttgggggaggattgccattcttaaaatattaagccattctatccataatacagtgggcctctccttttatttaggtcgtctacaatatcctttgatggtattgtattttataatgttcttcataaaagtattgtactttatttgataagtttattattcagtaccttcttttcattggtaatgtaaatatgtgtattgtttttatttatttaagttattcatttattcttttgggatggagtctcactgtgttgcccagggtagagtgcagtggtgcgatctcagctcactgcaacctccgcctcccggattcaggagattctcctgcctcagcctcccgagtcgctgggattgcaagtgtgagccaccaagcctggctaatttttgtatttttagtagagacagggttttgccatgttttccaggctggtctcaaactactgaactcaggtgatgcactcgcctcagcctcccaaagcgttgggattataggcacaagccaccatgcccagccagatatgtgtattgtttttaaatgttcttttagttgctggtgtatataattgtaaatgacttttgtatatctatatcccgcagctttcctaatgttttgtggttttgcctaggctaggacttctaatagtagtaagcaaccttattttaaaacagttgttgttgccaggcgtggtggctcacgcctgtaatcccagcactttgggaggccaaggcgggtggatcactaggtcaggagatcgagaccatcctggctaacatggtgaaaccccgtctctactaaaaatacaaaaaattagccgggcgtggtggcgggcgcctgtagtcccagctactcgggaggctgaggcaggagaatggagtgaacccaggaggcggagcttgcagtgagcggagatcatgccatgcactccagcctgggtgacagagcgagacaacgtctcaaaaaaaaaaaaaaaaaaaaagttgtttttaagtggggacagtttgttccctaggggacatttggcaatgtctggagactttttggtcatcacagttggggaagtggaggtgatactgctggcctcaaatagaaagaggccagggtgttgctaaacatcctgcaattataggacagctactacaacaaagaatttattcagccccaaatgtcagctgtgccaaggttgagaaactgtattttaaagggaatgccttaaacaatattttattattatgcagaattccaaacacaaaaataaattggtaaacagaattcccaataccaacagttaactattgtaggccagtatttaactcctttccttcccccaacttctgctgamttattttaaaacaaatacaagatatcacatcattccatctgtaaatacttctctgtgtgtcactaaagtagaggttcccaaattatggtttcagaatacccaaaaaatccttcagaccctcccagaagatctccaaggctaaaactattttcacaatggtactaagatgttatttgaattttcattctgttgacatttgtgctgatagtgcaaaagagttgaaaattgtggatgccttagcacaaatcaaggctctggcaccaaactgtacttagtggtcattgtacttttagtactgtcaaattctcttctgcttaaaaaaaaaaccaactagatttaagtaagaatgtgattcatgaagcagtacrgttttttttagtcttctacctaatggttttagtgatcattgatgaatcattgcccagacctactattttattaagtctggccaaatggtggtagtctaatttaaaatttccttctgtattcattaatgatatttttctataaagaagactgtgcttataccaactgtttagttactcctaaatatcctttgtgtaggaaatggaggaaaatgatttatttattttttcccagaacagagttcactctaaagggaatatgtttaatgaattttgttgtatttattttaatgtacattattggtatatgctgttagttttctttctctttgttgatatcttttatcaagttaaagaatttctcttctatttctagttcactaagagttttcaaagttaatggatattgtattcattttccattgctgtgtagtaagttaccccagaatttagtggctgaaaacaacaaacataaaagtttctgtgtgtcaggaatatggacacagcatagctggatcttctgcttcagagtccctcacaaggctgcatcagggctcractggggaaggaatgatttcctagttcatgtggtatttggcaagattcagttccttctctgtcttaggtggagggccttagtttcttgctgtgtgtttctgtatatggctacttaacatggcagcaggcaaacaagaagagccagagaaagtaaagaagatggaagttacatcttttccagccttatctcagaagtgacatcctatcacttttgccatattcatgagaatcaaattcctaggcccagctaaaatcaagtagacgggattacacgaaggtaggaatatcaggagttgggaaccatcaggtgctattttagaagcagccttccagcctgccctgtggcccccaatgactcatgtctcttgcatatggccctcttaatttgccccttcctccaggtctccaaaagtctcattctgttacagcatcagctcaaagtccagaatcttgtcatctaaatcaggtccagttgtgagtgaggcttatgggtgaagtttcttttttttcttgagacagcatctcactctgttgcctaggctggagtgcagtggcgcagtcatggctcactgcagtctcaacctcctgggttcaagtgatcctcctgccccagcctcctgagtagctgggattacagttgtgtgccaccacacctggctaatttttttatttttagtggagatagggtttcgctatgttgcccaggctggtttcaaactcctgggctcagccccccaaagtgctaggattacaggtgtgagccactgcacctggccaaagtttttaaaatacagttccttgtgtacagttccattcagtctgtagaaatgtgacattaaagatacaagttatcctcccttccctatatccagtatacaagggtggaacaggcatgggataatagacattcctgtttaaaggagggaaaataggaggcacagaagtgttactagtccatatcaattctgaaatccagccaggatgttagaagttccttgattccacctctgagttattcttcctttttcatgaaaggtagcatgtgttagcagctgtgtagttttttattagtctgcttcctgccagtagaattttgggagtctagtgacctcttttcgtgttatactatttctgggtttttttggtccagcctggcagtgttgctgctgatataattttctcaaaaactttgtcagtcctttgtgaaactcactggtgttcattccattgggtaatagtcacacccacgaatctaaggtacacccttctttactttgtgatctttctcagatggctgagggacaatgttcttaagtttcctagagcccctgttgttgagtcgcgaggacctattaggcacacccttaatttctttaaagagccctttgtatgacagaattactgggaaccattttccaagtagcccaccacaaaggttgtattttgtcaaattgaaggagtcatctgactttccttaatcataagctacaaatataataagctacattaatagattttctaatatttatttaactttgaatttctggaaaaaacccaacttggtaatgatttatcatctgagctttgtttttggctttggtatgctaatttttggcttaggatttttatatctatttcatgagtgacactgacctgtaattttcccttttcttactctctatgtctgtttttttttaatatagttatgcttcccttacaaattacttttgattgtcttttccctcaattttggatcacattttcctgatgctctcatttgagtaattttggagttatattttgtgtttctaagtcctgttaaaatccttggaagaatgctgattttatttttgttttggtagactgtcaggctggttaggttctaaaccacaagttttctcacctgtgaatagtatttccagtatcagttcaaagactgtgctatgctactttgggtctttcctatccacagaccatttattagttagtttggagctttggcaacagtttatattttaatttattctcagagcctttgctgtgcttccctgaatctctcttatgtgtgagctagaagttgtgctggttcatgtgcaaaattacgggaaaccctttctctggctcatcttttcctggattccccacatctctctggctcacagaggctcctttcattgttattctagtcagacgtttggatttctttcagagctttagctgcctgcgatgcgtttctgtatggctggtgccacccttagggtgaagagctcagaaaaagtgttaaaaataatgagaatgattcttacgctccttagaccactgtggtctttcccaattatttttgcctgaaatgaggggttttgcccagagtttttgctgctcacatttgtgcatagtgtggacttayggttctaattttattctaaggatctttatatttctcagggttttttgttttgttttttgaaaaagtcttagtttcttagcaggttatttttggtttatttaattctgggttggcaataattttctcttagtgttttgaagatattattccaccatccactagttgcagtggttgctgttgaaaaacctgctgtcaataattgtcaggcctttgttatatgtcatttctctgaccactttaagctctttatcttttgtgtattttgtttttattactgtattttgtgagtaggtgtggattcctttttttgtttagcttggtaaatgctcttcttgtaaatataattttagtttctttagacaacatagggctatttaaattgtttcttaagtgagctttggtagtttgtctttcaaggaatttgttcatttcctctaagttgttgaatttatgggcataaagttgttcataatccttattatcattttcaatccatagaatctgtagtgatctgtagaaccttgcattcctgaaatcagtaatttttacttggaacgtgttgagctctttggatcagtgagttttatagtttatataaaatttggaaaattgtgtactttttttttccaaattttttttctcttctttctcctttccttcaggactccaattacacatatatgagactgttggaaatgtttccatagttcactgatttttttcaattttattttcaaaaataggctttgttttttatagcagttctggattcatggcaaacttgaacagaaagtgtagagagttcccatatatgacttatccacacacatgcactgcctmccccaatatcagtatcctactggtatatttattacaatcgatgaatttatattgacacattattataacccaaagtccatagtttacattaacgttcactcttggcattgtatattctgtgggttttgacaaatgtatactaccatatatctaccattttagtatcatacagaatattttaactgtcctaaaaatcctccgtgttccccctatttatcctttcctttttcagccccttggcaaccactgattttttattctagccatagttttgccttttccagaatgtcatggagttggaatcatacagtatgtattcttttcagattgggctctttcacttagtaatatgctctttactccatgtcgtctcatgtcttgatagtttatttctttttagcactgctgtcaatacagcttaagtatctcttatccgaaatgcttggactagaagtgtttccaattttggattattttggattttgaaatatttgcatatacctgattagatatcttgagaatgggatataagtctaaatatgaaattcatttatgtttcatattacaccttatgcacatagcctcaaggtgattttatacaatattttgaataattttgttaatgaaacaaagtctgtgttaagtatgtgtggaatttcccacttgtggagtcaatgtgaatgtcacaaaatttcgtattttggagcatttcagatttttagattagggatgctcaacgtgtacttgaatgactgtactccataataactgtggaataatctgtggaataactgttttaatgcatttggtaattctaacatctgtgttatttaaaaatgagtatttttctcattacgagttgtgtttccctgtttatttgcatgcctgataatatttggatgccagatgttgtaaattttacttttttggttgctggatattttttgtttgttttatttttgtttgctggatatttttgtagttctgcaaatattcttgagctttgttctgggatgcagttaacttacttgaccagtttgatctttggggtttttgcttttatgatttgttaggtgagtctgaagaaatacttagtctgtgcctgattattccctattactgagtcaagacctggctgagtactctactaatatccaataaattatgagtttgtccactctgggtggtaagagcaagcactattccttgttctatgtgagttctgggcacagttccctgtaaattcgttctttccatttagcacatctccagaattctctctgtatacagctctctcctctttgattctctggcctgaaaactccaaccaggactttcagctccatttctcaacttagagtctgctgggctctgcctgggacccccttcttataccacagtctggatattttctcaaggcagtaagctggggcaattatggggatcacttttttccccatttctcgggaaacagtcttcttcattgcccctaatatccagtgttttgaaaattgttgtgcaacgtatattgtctttttttttttttttttggttctttcgggttggattactttgaagcctttcatttatagatatttcaatatggtcctttgaaagataagcactctttacttttttctgaaaccttttatattatctgaactcatcacgtgtgggcagcactgtgttgctgtgttcatgaaacatttataagttatgtactagtttgctttatttcccagtatatcagttttgttcagtaacaatcatttgatagattagtgctcacctttaaattttttaaaattttgggcagctgatggctatgtgtgttatctcctatttctttatgttatcctggattcagagccatagaatactacctagattctttaggaaagtctttgtgtgcctgacattctgtttatymttttcatatatttaaaaaaatatatttaatacatgtattyttccataaaatatatgttgtcatattgggttcagatcttggctttaccacttactgactgtgggaccttgaatcagatacctaacctttgtatgcctcattttcttcatgtgtaaaatggtgatagtaatggcatttacgtcatagggttgttaataaggtttaaatgcattaataatatgtaaagagcttaggatagtatctggcatctaagtgctataaatgtgtgttagctcttattatttttaccacaactaccaccaccactgcatrtattactgctagtgtccatgccaggagaaccatgtctgttccctaggtggcatatgggtgtgtgtatgtaaagatgaggtgactgtgtggtcttgtgctgctctctctgagccctccttggcctctggagtaatagtattgctgtccacctggtcaatgtgtcctgctgataagtgctgttgcagtctgtggtcagcaaatggtccagtggttctccttgcttcactggcctcaccttggctcatgctgactctgaggtttgggtgtcatattctttaagccctggacctgggcagtaagacaaatagcccttagttactgaatctctttgcctcccctggggcaaaaccctgtccttcagtgattttgctagcagaatccccacctcccttcctcttctttcattgggcatacagaaaatttgggatgccttttatgccttgtgggagccagagaactctggataactaaatccatgccctccttcctcctaacccttctatgttgatgattccgcccccacattttcattaagggtcatcttgtgtagcagtctcctcccagaaccccaaatgggagatggatcaaagatgcctgtttttttagctttttcttccatctgcctagcatgtcttttcccttttggaactctatcctggagagaggagatgagaacagacttgtgtcactgctgcttccttcccactgttctcttctcctgtcatgaagacaccagaagtctaggccgggtagactttccatttcctcttccactttcctttgggcatgatggcaggtgtgatactgggaagggggaatctgcttgctgataaggaaatgtgtgttgggagatattttaaaaaatataatccttggctgggtgcggtggctcatgcctgtaatcccagcactttgggaggccgaggtgggcagatcacctgaggtcaggagttcaagaccagcctggccaacatggtgaaaccccatctctgctaaaaatacaaaaaaattagccaggtgtggtggcatgtgcctgtagtcccagctactggggaggctgaggtactagaatcgcttgaacctgagtggtggaggttgcagtgagcccagatcgtgccactgcactccagcctgggtgacagagtgagactccatctccataaaaaaataaaaaataaaaaaataaaaaaataaaataaaatattatccttgttaaacaggttaaagggaaaaagaatattttagggtaaaggtgggggtgccagtttagatgggaattagggaaggtttctctgaggacataacacttgaacaatttcaaggctgttttgtagtattgacaaaatttaatactaggatcaagattgcttgtgcacaaagccaaaagatgggctctcttatgccctcttcttcccatactgcagttagtacattctgttttctgcagtggtaactctttctggcctaattgctcagtttctcatactagtctctgtaacacatttattctgcttatcactatagagtcctagtatgtagaggctgacaaaaacctgaggcaatatttcttcaagcaagctaccggtttcagaaccatctggaacacttaaaattgctcctctcgaacccactccagtgtcataattactaacagtttcatttggaatctgatactgttgaatttatcatattacttgaggacgagcagtttgttattgttatctttttagccacacagcattgtaaattctaagtaaatgcttgataaattgatttattaggaagctaggagagaggcatttcaagtggtttaaaaagttttgctatttgggggtgacatcagcaaaagcggcacagtaaagaagtgtaaaattttacccttccataagagcgacagaagaactggcaacacctgtcagaatcaactttttcagaactctagaaattaaccaaagacttgaaaaaaagtgtgaagagtgctcattcacaaaaaatggctgaatcttagtaagaatagtgagcttacccaagccccattccctgttccatgtgtcagctggggctgaaataacagcctgtgtttctgtactggagggagcagaacagacctcattgtaagtatttgttttgccttcttaggtggatccctggatgaatgacttcaaaaccttgtctctatttctcctgactcagaactgccctacttctgagatcggggaggacagtagttatcaagaaacatttacagacaaataatttagtcattgcttcctgaatcaagaaataacaatgggggcaaacagtagactaactaaagagcctaggagcagagattgggaatgagatgtctatgagagctttgaaaagcttcacatattcccaagaatgtagaaggccacatgcttggcaaggactgtatgcatgcccagggaagacttctacctctcgctgatcttgaggctctgtgaaagcaggaagtgaagcctaaggcagagttagaagctacctggctaagtagtgaaggtgtatcccaaacctacccagagcccttctgcaaagacagacaggttttttggttccaagcatttaaggcagtctgttcagttgttagctggccattaagctaacagaatagagactccagtgactgcacataacaaggaatacagattttacagaattagttttgataagtcttgaaacaaacaactacaacaataagcagcaacaaaaaattctggagaggggagagaatctgattcccagagttgccacattataagatttaaaatgtctagtgtttaacaaaaaagtgtaagatatgaaacacaacaagaaaaaaagccatgaatagaaattgtccctgaggaagcccagacgttagaatttctagacaaacactttatattagctatttaaaataattcttcaagagctaaagaaaaccatatcttaaacaaaacaaaacaaaacaaaaaacccaaaaacctaactgaaagtttgagaacagtgtctcaccaattgagaatatcaacaaaaagatagaaattatgaactaaaccagatagacaagcatggtaactgaaatgaaaaatttgcttctagggcccatcaggagatttgaacaggaagaagaaagaaatttgaaggtagttctattgactttatctaatttgaagaacagaaaaggaaaaaagtaattaggaaatataaatagagcctaaagagacctgtgggataccatcaagtgtaccaacatacacatgacaggaatctcagaaggagaggagagatggtggggcagaaggatatttgaagaaataatgggccaggtgcagtggctcatgcctgtaatcccagaactttgggagaccaaaacaggcaggtctcttgagcccaagagtttgagaccagcctgcgcaacagcgtgaaaccctgtctctacaaaaaatacaaaaattaaccatacgtgatgacatgtgcctgtagtcccagctactcaggaggctgaggttggaggatcacttaagcccaggaggccatggctgcagtgagctgtgattgcactactgcactgcagactggacgacagtgtggaaccctgtctcaaaaaaaaaaaaaagaaaaaagaaaaaaagggaaagggaagtgaaatagtggctaaaaccccaaatttgatggaaaagcatgcatttatgcatacaagaagctcagtaaactccaagcaggataaaaccagagattcacagctagacacatcataatcaaactgttgaaagccaaagatagaatctttaaagcggcaagagaaaagcagctcatcatgtacagggtaacctcagtaagatgaacagcagacttctcaccagwaactatggtgcccagaaggcaatgggttgatgtactcacatccctgaaaggaaaaagcccarcaaaaactaccatatctggcaaaactccccttgagaaatgaaagagaaagaagatattcctcataaaccaaaactgtgagaattgtagctagcagacctgcctacaacaaatgctaaggggaattcttccagctgaaatcaagatgcactagatggtaactcaaatctgcatgaaagaataaagaacatgggtcaagttaactacatcggttaacttagcactggcccaagctggttcccagaaaaaggagaccgtccaataatcaactgccagaggacaggaaggatgaaaccatatttttctctcctcttcactttcaggagccctgcacayttcccatatttcagtatataatttttgagtaaattagcaaggtgagatcttttcaccagtctaattctactaaaaaaaaaaaaaagtaggcttagtattattagtccatagggaatgcagtttaaaaccacagtgagatacccctctatattcaccagaatggttaatattaaatgaatggacattacagagtaatggcaaggataatgttggtaggagttaaactagtataaccatttggggaaactatatattatggctacttagcaaaacatgcctagcttataaccctacaaatccactcctacatatattcacaacataaagaagttatacactttaaaaattacactaaaagacttacagaagaatatttatagcagcactattcatagtaatagctgaaagctagaaatggatccaagtacctatcaacagggggatgtataaataaaatacattatattcatgcaattagatattactcagcaataaaaagaagcaaaccagtgatacatacaacatggttgaagctcagaaatatactaagtgtacacagccagctgcaaataagtatatactgtaggtttccatttatatgaagttcaaaagtagctaaaaccaatcttttgtgatagtagttagaatagtggttattctrgggggctgactgggaggcaacacaaaagagactgttgaggggctagaaatgatcactgtcctatctaggtggtggttacatggctgtatatataaaattttgagttacacacttcagacagtgttgctgttaagatctgtgtatactccatattatgaaagataatttttaggatcttaaaaaaaatcttgattgctctgtcagtgttattgaaatcaaggatgtataatattatcaagttcaatcatcctaaaaggaaattcaattatagtttcatttttgtaactgttaaaagcattaagatataaacatgttaaacaattctcctttgagacataaacataaaaacaggtctactgatgagtctgttgattaccctattgcattttagccaatgtttaaatatttggtcatgtatgttattcttgaagtgcagaatgtgcttagggtaattattagcaacatttaaccaaattggttctgttatttcacgctggaggaccagagcaggatgagtcagtaaggggacttttgagaaatgaaatgtcagtgtttttgcaaccatttgtaggccataaaaaaaaaaaatcagatttgttcttacaaagaatgcaggactggccaaacaccaagatgttgctacacagagagaataaaacaaccagagacaaaaccacagcagaactgctttcatccccaaattgcagaataagtactgagatatgaccgagaaacaggggagagaaagggtaaacagtggaggaaagagatttttttgaccttatgctaactattaatctgaagctagaaatgctgattttatctgaaaaattagagctttccacagttattcatttattcaacaaatatttgttaaacttccattatgtacctagaatcatcctgggcgcataagatggagcagcagacaaaacaaaaattcctgcccttatggaacatatattgggggagggggtgtggcagaaatgcatacacatattgtacatgtagcaatgaggttagattagatggctactttttctctttctttccttctttccttcctttccttcctttccttccttcctttcgtcctttttttttgacagggtttccatctatcacccaggctggagtgcagtggtacagtcttggctcactgcaacctcctcctctcgggctgaagtgattctcctacctcagcctcccaagtagctgggattacaggcatgtgccaccacgcccagctaatttttayatttttagtagagatgaggttttgccatgttgcccaggctggtcttgaactcctgacctcaagtgatccacccacctcagcctctcaaagtgctgggattacaggtgtgagccactgcacccggccaaggtggctactttttaaagtatgccatagtttagccttcaactatatatgccttatggaacctccagtttaatgctgctgttgatacccctcttagattttctaatgagaccttcctcagcactttaataatgaaatctactatatgactcaaggttgatgtgtcttactcagtggcaaagaacagaataagaaatagatccaaacatatcggaatttaagacagtggaatgatatcttacagaaaggagtcagggtattgggtcctaaaatcaacacagatcaaagctgaaattaataaaatagagaaaaatagaataggataaataaaaaccaaaatcaattctttgggatggtcagtagaaatgtaaaccctttgcaatattgatgaaaataaaagtgaatatgtatcataaaggatgaggaaagagaaataatcacaactgtaaacgatttttttttttttgagacagaatcttactctgttgcccaggctggagtgcctggctcactgcaacctctgcctctcaggttcaattgattctcctgccttagcctcctgagtagctgggattacaggcacgcgccaccacgcctagctaatttttgtatttttagtagagacaggatttcaccatgttggccaggctgaactcctgacttcaggtgatccgcctgccttggcctcccaaagtgctgaggttacagggcgtgagccaccacgcccggcctataaaagacatttttaaaaaatgataggagaatacaagaaagtacatttgtaatacatttgaaagtctagaaacagtggctgatttttgaagatagatggagagcttcagtaggttgattagcaccaaagagattaaacggtgattaagagatatcatttaaaaaggaagagatgatacacaactgaattatttctaatcagtggagaacagatgagtccgatgctatttaagctattttagtagatggaaaactccccattcattttccaaagctatgatttaatgtcagaacccaatagaaattacataaaagaaaactttagattagttttcttatgcatgcagatgctaaaaccataaataaaataccagtaaatagaattcagcagtgtagcaaaaactgatcagctattatgaccaaatagtttttatttcagcaacaaaagaatagttcactactagaaaaatctgtcaacagaatgtactacatcaataaattaaaggagaaaaccatatgatcatatcattcagtgctgaaaaggctctgggtacaattcagttgtcattcataataaaagctcttaagaaggaacaggaaaaacactacctagatatagtaaagactkcactcaacatgtttttactaagcatccattatatgcccagtaatattccagcagttaacagacaaaacatttagagccatctcattttttaaaaaagaaggagttgaatgtttagtttgtcagatggtaataagcgctttgaaataagaaataaagcagggaataggaggttgccaagagctgrgatgtaggaattgtcagggaaggactcattggtaaggtgatatttgagtagagaactgtaggagagcaagtcaacaaagcaggcaaaaattccagccatcatgtatcctacggtctcatggtgggggagggggcaatacaaaaaacatgataaaaacatatagcatattagaaggttatagtggaaaaaaggaaaaacagaggaaagtaaaggggaccagggcccagaggattttgaaggtcagattataaagttagtagtctcattgagaaggtgatatctgagcaaagtctcaaaggaggtgagggagttagccaagtagatattacaggaaggagtgctccaggcagagagaagagtcacagtaaagtagctatcaagagaccacgcctggcctagtcaaggacctacaaagatgtcaataggactggagtagagtgaacaagggagtgtgtgaaggtcaggttattttatgtgggaccttgtagaccactggaaggactattttaaaaattaccttaatgaatttttataaggcaaacactcttataactattacccatgttaagaaatagaaccatatcagtcagtccagaagctttttcatgtaccctatcccaaactaagtcccctcctcttctcccaaactatccactattttggcacctttagaaatcacttactctgcttctttatacttttattacccaaatgtgcatttagacattgtagcttattcttactcattaaaaataatttgacaagtcttctcttttaatcgacagatttccaagtgatccattcctttctttaccatacactattttttgaagaacccaagctatttagcctgtaaagttattcacaatctgaattttgctgattggaaaattgtgcagttttgcaatcgaactgctgattatccagcatgttcttctgaattctctacttcctgtaaattgatcgctgagcccagaggcttaatcacactcaaggtcttatttggtgaggctatatacattatgtgtggttgtcatttttcttgtgattttagcagccattgatcctcagtgcctagattcatcaatttgttgactattgtaaagtgctgatattctaattctgatctcttttctacatcttacttggaacaattttatgaagagacatatccttgcctctatattttttggttgcccagggttacagcttttcatatacaaaaagcataataaatacttgattcttttgcttttttkgggccagttttcaagataatggtttggttccttttcatcttcccaagagaccaattttatatgtttctatctgttgcaattagcatttttattgagttcaaattgttccttctctggccactagatgcttctacacattrcctcctgagtacttttgctgtgacctcagttgtgtctgatagcttccttgctacctggtatgataacatctggtgtgacaagatagtacatgctcagctgagcttagtgatcagctgggactacaggtgcccgccgccacgcccggctaatttttgtatttttagtagagacggggtttcaccctgttagccaggatcatcttgatctcctgatctcgtgatctgcccgcctcagcttcccagagtgctgggattacaggcgtgagccaccgtgcctggcttgtttattttatatcagtgcaagttggtaccctttgacctacatctccccatttcctcccatttctgcccctggtaaccaccatcctactctgctttgatgtgttttacttttttagattctgcatataagtgagatcatacagtatttgtctttctgtgtctaatttatttcacttagcataatgtcctccaggtttatccatgttgttacaaatggcagtgtctcctttttaaaggctgcataatatttcattgtgagtatatattaatccatatatatgtatatatccatatccatatcgtatatgtatcaccatttctttagccattcatccctacattttaggatttttttttttcattttaggacattttcaaaggattgtaaaaattctaaaaagagaatacgcaacagattattctttggattatagagcctaaactatttgctgtctagtcttttacagaaaaaatttgctgacatacactctagtagattcttcagaaagtgtctgtgggaacaatattctctgagtttgtaactttgataacagctgctctgtgccttttatacttttacaagtcatttttcctggatgtaagattcttggcttatttttcttccatatgtatattaaatagattgttcaatttcttctgggggaaaaaagtattgatattctacaagaaaagaaaattagaagccagtatttctggtgaatatagatgcaaaaatcctcaacaaaatattaggaaacaaaattcatcagcacatttataaggatcattcaccataatcaaatgggacttatatttgggatacaaaggtgattcaaaataatgcaaattaataaatgcgatataccacatttacagaatgaaggacaaaaatcgtatgatcacctcaatagatgcagaaaaggcatttgacaaaattcagcatcttttcatgataaaaactctcaaccaaattagatacagaaggaaggtatgtcaacacaataaagactatcataagcccacagctgacatcatcctcagtggtgaaaagttgaaagcttttcctgcaagatcaggaacaagacagaatacccactctcaccccaattctttttttttttttttttctgagacatggtttcactctgttgcccaggttggaaggcagtagtgcaatcacagctcactgcacctcctcctccgggctcaagcaatccttccacctcagcctcccaagtagctgggactacaggcacataccctcatgcctggctaatttttgtatattttatagagttggggttttgccatgttgcccaggctagtcttaaactcctaggctcaagcagtccactcaccttgccctcctaaagtgctgggattacgggtgtgagccactgtgcttggccttactctcaccacttctgttcagtacagtactggagtcctagccagagcaattaagcaagagacagaaataaaaggcatccacatcagaaaggaagaaactaaattgtctctatttgctgatgacatgatcttacatatagaaagtcctaaagactccaccaaaaattgttagaactagttaatgaattcagtaaaatttcaagatacaaagtcaacattcaaaaatcagtagtgtttctatacactaacaatgaactgtccaaaaaagaaatgatgaaaacaatctcattcacaatagctaccaaaaaaaagacttatgaataaatttaaaatttaatcaaggaggtgaaagacttgtacactaagaactataaaacactgatgaaagaaactgaacacactaataaatggaaacatatcctgtattcgtggattggaatattgtttaaatggccacactacctaaaatgatctatagatttcaatacaatccctatcaaaatttcaatgacattttcacagaaatagaaaaagcacttgtaaaatttatgtagaactacaaaaagccccaaatagtcaaagcaatcttgatagaaaagaacaaagctggatgcatcacagtatttgacttcaaaatatactgtaaagctatagtaatcagaatagcatggtactggcataaaaacagacatataaacgaatggaactgaatagagmgcccccagaaataaacccacatatttatggtcagttgatcttaagggtgccaagaatacacaatagggaaaagacagtctcttaaataatgttgggaaaactggatatccacatgagaagaatgaagttagaytcttacctcacatcatatacaacaaccaactcaaaatggatcaaagttttatcttggaaaaaaaaaattttttttttcttttgagacagggtctcactctgtcacccaggctggagtgcagtggtgtgatcttggctcactgcaacctccgccttctgggttcaagcgattctctcacctgagccttcctagtagctgggactgcaggcatgtgccaccatgcccaactaatttttgttgttgttttcttttttctttcttttcttttttttttctttggtagagacggggtttcaccatgttggccaggctggtcttgaactcctgaccttaagagacccaccttccagctgggcacggtggctgacgcctgtaatcccagcactttgggaggccgaggtgggtggatcacaaggtcaggagatcgagaccatcctggctaacacggtgaaaccccatttctactaaaaatacaaaaaattagtcaggtgtggtggtgggtgcctgtaatcccagctactcaggctgaggcaggagaatggcgtgaacccgggaggtggagcttgaagtgagcgttgagatcgcgtcactgcactccagcctgggcgacagagtgagactccgtctgaaaaaaaaaaaaagatccactcggcctctcaaagtgctgggattacaggcatgagccacctgtacctggcctcaaaatggattaaaggtttaaatgtaaaacctgaaactgtataactatcagaagaagacataagggaaaagctctgtgacattggtctgggcaatgaatttttggatttgacctcaaaagcactggcaacaaaaacaaaaatggtcatatgggattatgtcaaacaaaaaagctctgcacagtaaaggaaactatcaacagagtgaagagacaacctatagaatgggttgatatatttgcaaaccatrtatctgatatggagttaatatccaaaatatataaggaactcaattcggcaagaaaacaaatctaaaaaaatgggcaaagaacctgatagacatttatcaaaagaagacatacaaatggccaacagttatatgaaaaaaatgcttagcatcgctaatcatcagagaaatgcaaattaaaactacagtgtacctcatacctgttagaatggstattataaaaaagataggccaggtgcagtggctcacacctgtaatccctgcactttgggaggccgaggtgggtggatcacgaggtcaggaggtcgagaccatgctggctaacacggtgaaaccccatctctactaaaaatacaaaaaattagccaggtgtggtggcgggtgcctgtagtcccagctacttgggaggctgaggcaggagaatggcgtgaacccgggaggcagagcttgcagtaagccaagattgagccactgcactccagcctgggtgacagagcgagactccgtctcaaagaaaaaataaaaaaaaataaaaaaagataacaagtgttggcaaagatgtggagaaaaggragacctatacactgttggtgagactgtaacttggtacagccgttatggaaaacaacatggaggttcctcaaaaaattgaaaatagagctaccatatgatccagcaatcccactaccaggtatgtacccaaaggaattgaaatcagaatgtggtagatatacctgcactcacatgttcattacagcactattcacaatagccaagatatcaacccaagcatccattcacagatgaatggataaaaagaaaatgcggcatacatacacaatggaatactatttagcctttaaaaggaggaaatcttgtcatttgcaacatcgttaataaacctgtagaacattattgtaaatgaaataagccaggcatggaaagacaaatacttgggatcttatttctatgtagaacctaaaaaagtcaaattcatagaagcaagagtagaatggtggttaccagggcctggaggttagaggagtggggattagagatgttggattaaaggatataaaatttcatttagacaggaaaaataagttcaagagatgtatactgtggtgactatagttaataacagtgtattctatacttgaaaattgctgagactagattttaaatgttctcatgacaaaaaagtgattatgtgaggtaatgcacatgttaattagcttgattgagccatttcaccatgtatacatattttaaaacatgttatatattcagttttcatcagtttaaaaaacttaatttaaaaaaaaaaagttttgatgttgaaaagtctgatctaattttcttctcctataggtaatttggatacctatactttgcctagatactcaaatattttttctttaaagtgcaataattttaatatgttttgttggtcatcatatagcagatattctcagatataccatgtgttctgtcaatatatagattaaaaaaactttttaaaaataatgttttcttaaattttggtttttagtatttgctgtgttccctttgattctcttcttcaaagactcctatttttcattaaagactttttttgcctgttaatatttttcactttcttttgaattgttttatttcttcttaaattttaaaaacatttcatatatatatatatatgtatttttttgaggcagagcctcactttgtctcccaggctggagtgcagtggtgtgatctcggctcattgcaacctctgcctcctgggttcaagtgattctcctgcgtcagcctctcaagtagctgcgagtacaggcatgtgccatcatgcctggctaatatcttctattttcaattagtttaaattggaaagcttttaaatctttgaaggcattctatttcacttataatttcttttaagattctcttgtatttaytaactcttgtcttccttctagtttagtttatttttgtaatgatttttccttccatttctaaattcctgagctctatcaccttatttctaatatgatttatgtatcattttctcagtgtcttttagcttgttttaaaatagtaagttacaattttaatgttttgtgggcatgtctttttttctctataggaatgttcttcttcttctctgttttcttttaacaactctttatggtatttgaccaaatacttttttgtcactcatttttactgaaaaacagttttctcaagcttttgggaggaggaatagttcaagctgtctttattaatttcatagctctccatctcctgttttttggttttgttctggtaaagcgttaaataatatggtggcttgctttctgagacttcctgactccatagcctcccctcgcttgtatcggggccttctctttcctttgtctctgtcaccattgtaattagcccaattctgattctcctcccagaagtttctaattgcgatgtcctgtcctggaaaggagctttggctggttggtttcaagttcatgtttcccatctttctctggcccctttgagaacctaccagtggcccttatagtcactttttggtttgatgaaacccttcccaatttcaactggtgttctcaaatagatctgctctgatttttagagtttggtttatggctgctgtggtgtttcccattctcagttttcagatgcgttgttgcttctttttctttcaccacattaacattcattccatgaggggattgtggttactgttggttgtctccacgaacttgtattttggagtttgtgagctactttgtcatctagttttgttgtccatggtgttttagttttgttattggattactttgcatgtttttagggaatgatttggtgagatgaaaactattcagaatagttttttctatttggatgatctcatcaaatcatcccctaaatctatacaaatcaggaaatctattcaaataggaaaaactattctgtgattactcagattccctctcatttccagtgcctagtcactctgagtgactagggagtcattgcaggattttgagcaatggagtgacatgacctgactggtgttttaaaggctctgtctggtgatagactgagaatagaccatagaaatgtagaggaagaagtagggggacctattagaagaatgttgcagaaataggctgggtggatcacttgaggtcaggagtttgagaccagcctggccaacatggcgaaaccctgtctctactaaaaatacaaaaattagctgggtgtggtagtgggtgcctgtaatcccagctactcaggaggctgaggctggagaattgcttgagcccatgaggtggackttgcagtgtgctgagattgtgccactgcactccagcctgggcaacaagaatgtgactccatctcaaaaaaaaaaaaaaaaaaaaaaaaaaaaattgcagaaatccaggtgagagatgtttgcttggacttggggagcagcagtggagttaatgagaagtggccagatttgcatatattttgaggyatagttgataagatttcctgatggatttgatgtgaagtatgagagaatgtagttgaaaaataactctggttttgtcctgagcaactgtaagaatggagttgcttttaactgagattagaaggctgaggctgccgtgcgggtaaggtagactttaggggtgacataaagagctcagtttggactatgttgagcttgagatagttattagacttctgagtgaagatactcttcgtgattctgcgagtcccatgacagcatgaggtaaaaaaagaaagacattgggccgggcgcagtggctcacgcctgtaatcccagcactttgggaggtcgaggtgggcggatcacgaggtcaggagattgagaccatcctagctaacacggtgaaaccccatttctactaaatatacaaaaaagtagctgggcttggtggcgggcgcctgtagtcccagctactgggaggctgaggcaggagaatggcgtgaacctgggaggcggagcttgcagggagccgagatcgcaccactgcactccagcccactgcactccagcctgggtggcagarcgagattccgtctcaaaaaaaaaaaaagtttatcatagaaaattggaaaatatggataagttaggtaagaaaataaaaatcatgctgcattgtaaacattctgatatgattctaaacatacatataacatgcatttagaacacatcgcttttttctttccaacttttaggttcagggagtacatgcacaggtttgctaccggtaaattgtctgtcacgggggtttggtgtacagattgtttcatcacccaggtaataagcatagtactctatgggtagtttttcgatcctcaccttcctcccaccctcgacccttaagtaggcccaagcgtctgttgttcccctttgtatctatgtgtgctcagtgcttagctagcacttataagtgagaacatgcagtatttggttttctgttcatgtattaattcgcttaggataatggcctccaactccatccatgttgctgcaaaggacactatttcatttttttatagctgtgtagtattccatggtgtatatctaccacattttcatcatccagtccactgttgtgggcatttaggttggttccatgtcttagctattgtgaacagtgttgcgatgaacatacagttacatgtgtctttatagtagaacgatttatattcctgtgggtatatatccagtaagggggttactgggtctaatggtagttctgagttctttgagaaatcttcgaactgctgtccacagtggctaaactaatttacattcccaccagcagatataagcatactcttttctttgttttgttttgttttaaaactaaagcttattctggccaatttactctactattttctaataacagctcatagatcagaaacggtctttgttttaaactttcctatccatatgaaacacaatgatgttggggtaagaggggccttttctctaaatgaaaatacaatacttattctgtayaattctagagggcccagagatgtggaaataatgtatttgtaagaattatattaaacaatctttatttgataaatagtaccttacaatcctaatgctatctatcaagcttcagtaagagcaatttcagcatcaagtaatgaacagtagctaaactgacaagagatcaatcaaaagggctttaaatggagcagcaccagctgatgtgctgctaaggctctgggcattcaggactctcctatggggaaaacggaatcaaaccagcaggtgctctggacctaagccttcacatcgtgacctgcctccctcctgggggtgtggtggcccacagtccccctggcatttctcggcccttgtgggctgcagacggaaatcctggcaccaaaggacagcttgggaaaggctgaaacttgacctcacagtcagctggcttctgcctattgtggtcattttctttccagagcacctagagcactcgcacagtggacgtggaagccacccagcattcttgggctgttttctcatagaagaggaccttcctctaagcattggaagcgtctttctccaattcctgggccagatcttgggccatcttcttgtaggtcatgggtctgacacacatggttcaagttttcgtggctattgtgaatgggattgtgtttttgatttagctctcagctcggatattgttggtgtatggaaatgctatttttgtacaatgattttgtatcctgaaactttactgaagttgtttatcagatctagaagcttttgggcagagactgtggggttttctaggtataaagtcatatcgtctgcaaatatggaagatagttgacttccactcttcctggatgcctttatttttcttactackctatctaggacttccagtactgtgttgagtaggagtggtgagagagggcatcctggtcttattctggttctcaatgggaatacttccagtatggtatgcttccagcagcacatcaactggtgctgctccctttaaagcacttttgattgatytcttgttagtttagctattgttcattacttgatgctgaaattgctcttattgaagtttgatagatagcattagaattgtaaggtactatttatcaaataaagattgtttaatataattcttacaaatacataatttccacatctgtgggccctccagaacatttcagcatgttctggatgttggctgtgggtttgtcatagatatcacttattgttttgaggtatgttccttcgatgcctagcttgttgagagtttttaacatgaagggatgctgaattttattgaaagcattttctgtgtctatcgagatgatcatgtagtttttgtctttagttctgtttatgtgatgaatcacatttattggtttgtgtatgttgaacccaccttgcatcccagggataaagcctacttgattgtggtggattagcttttgatgtgcttctagtctctgtttcctagtatttttgttgaggatttttgcatctgtgttcatcagggatattggcctgaagttttctttttttgttgtatctctgataggttttggtgtcagaatgatgctgacctcatagaataagttggcaaggagtccctcttcctgaatttttgggaatagtttcagtaggtttggtacaaggtcttctttatacatctgatagagtttggttatgaatccctcctgtctagggctttttctggttggtaggttttttagtactaattcaatttaggaactcattattggtctgtagaacacattttcacaaagttgaatttctattgtatatacattttaaaatcttctttcacaagacatgacctgagcattttctaatagtgaaagtctttgaaaacatggtttttaatggtatttcattacatgttttactgtaataaacctaaccacttggattatgtactctttcactcattcctttttgcatatctgttccatcccctatgctttaatatggaggatttggtttcttgtagtagttgctgggtatcataattcagacctgtggtttggcagtcagcctggctgtagtgtttaactgagtctcgtggaagatccatgcttaaaatgaatgtcgtggagaattgtattcacctcagtcattcaagactttggcatagaccccattccttgaggaggagttgccgccactgtgactgccacagacggaaggaagcctgggcagttgggactggggagaacttgctgagtcacagatatcttgtctcagtgtgcatgggccgtgtgtattgaaatgtaccagtctgtgaggcactatgttttgaggtctcagtaagctaaaggggtgtagaatggtatctagttcataccgtagtatgctttagatctaagtgttggttaattctgtaaggactgaaggaataggggagatttaatgagctccttgcagtctgcaggttattatcgagaaaagaaaattaggctctcagttccaggcccatttccctctaatcactgtgtccttttgaacaaaagttggcaaactttttctgtaaagggccagatatttttagctttgcaggccatatgatttctgttgtaagcattgagctcttctgttatagagcaaaagcagccataggcagtacaggaacaaatggccatggttatgttctagtaaaactttatttacataacaggcagcaggccagattggagcaatagttgtcaactcctgctttgaaaatgttttggaaactgtgtctccgtctgttagtggtcattatcctcagtctcttaggatcagagtttttcttagattacaaaactggatcatacagacctgacttccaggtctgcgttctctccactacactttgctgcctcttagaaaaacataagctaaataactagaacccatggaaagagggaaaagtgaagcccagagagctgatgcgggactaagaggcaactctgagagtttcaatgtggaatgtttgtgtggctccccaaccagaccgtgacctccttgaagattgggactgcatcrtatcttgttctcattttctattttattttaatgatctatcctttgggttgaacgaatgtgtttcttgaacccgataagtgcaacactgagtaaacacttgtttcttttctcccttccatcctcccaacttagtagcttcaatacattcttagctctcctcacttgctattctctaaccataccacgtggctgggcacggtggctcatgcctgtagtcccagcactttgggaagccgaggtgggcagatcacctgaggtcaggagttcaagaccagcctggccaatgtggcaaaaccccactaaaaatacaaaaattaactgggtatggtggtggcctgtaatccccagctactcaggaggctgaggcaggagaatcgcttgaacccaggaggcagaggttatagtgtgctgagattgcgtcactgcactccagcctgggtgacagagcaagagtccgtctcaaaaaacaaaaacaaaaaaaaccccaggttatctccatgaatgtgaatattgatgtggtccttctgtcaggaagacatcacctgagaccacacacagaaagcctawttttccttaggatacagtcctacatcagggttgacaaagtttttttgtaagggttagatagtaaatattttagattttgcaagccatatggtctcttcctcagctactcaactctgccgttgtactacaagagcagccatagacaatctatacatgaatgagtgtggctgtgttccagtaaactttacttatggatattgatactcagatttcacatgattttcatgtgtaatgaaatgtgattatttttatttaaaacattaaaaatgtaaaagccattttttgcttgcaggccagacaaaaacaggcagtgtgagtcaatttaatttaatgtgtgactcatagatgctaacccttgccttagctgcttagtaacttkccctagtcatgtgttaccccatgaaaagaatggcctacttctgtcatattgtctctaacctctgtcatttcatttatgatgctatgtattatgtgtacctttgtctctcttgctggattctgagtatcttgagaggtaggccatggcctagtcagtcatctttgtatccttaatatcaaacccacatagtgggtatttaagaagtgactgttgaatttgaattttatgcttgatatatataaaatgtcatttctgctgatcttaaagagaaacacttgactgatatgcataggtttcccatgttcttccccttgagaggccatagttaactgcatttgctgctagyggctcttgtaaactcagtggttatacagcaaagcctttgcaaagtcttttattttagagctctttttcagacaagaaatgattatactttttcttcaaatcatttattcaatcataatgataaatatggctttcactattctgatgaagcagagctaccatcagtgtgaaataataatagccgttgtttagtgagcatctactacattccagtcaattcagattttttctctagatttttggtgaccttctgattactattaatttacatttttttttattgttctctacatgtcaaacaaaacaaagcaacaatatcaaaaacccacatgctttttcttcatactgtctatattattgaatgacagacaaacatctgtccttcaagtcaaatattaattaatcatagactcctttctcttyttcttcaccccgccttatctaattggccactgtcttagctttttttttttttttttttttaaagatggagtcttaccctgttgcctagtctggagtgcagtggtgtgatctcggttcaccgcaacctccatctcctgggttcaagcaattctcctgcctcagcctcccaagtagctgggattacagacatgcaccaccacacctggctaatttttgtatttttagtagagatgggatttcgccatgttggccaggatggtctcgaactcctgacctcaaataatccacccactttggtctcccagtgtcttagcagttttaaaaattatctttggaatttgtctcatctctatttctaattcatttaatctaattgaagccttaatcatttcttttcttccaacatgttgagcatctgttctgattttcctgaccccacttgcctcattctccaattattcttcccatagttrtcagcactgaatgctaataataatactttgttcatatcagttgttattaaaactcttcacttattccttattatcttcaaggtaagcccagcttcccagtcatgacatacaagactctatgtgtgaccccaatacttaacacagatgtgtttcagaattcagaattttttggattttagaaaagtaatacrgtttatgcaatacatatataacatcctctgctcattcctgaacactgatgggagtgaatggcaggtgcttttaataattacgctgaggtaaattatgctaggtgtaaactggacctgtcctgggcaaacgaggatgttctttacacagtttaagaatgtcaagcaaagaacattagggatgaagcaatacagggagaatagatagagtgaagggagcagtgggttaagtggagtcctggagaaatatttgaaaagggagaaaggaatgtggctcctgaggtaggagggaaacctggagcaggtagccccacagaagcccagggaagaggcattgtttttctattattttggaagcagatcccctttaggagactcctcatcagataatgattattcactaagaggttatattcttaattaaaagggcctttaccttttcttagaatactatgtttgaataactttttatgtattacgatataaaagtctcttttaagcatttctgttttatagtcatttggccaaaatctaattcagatccagcttaaatccaaatgtcatttgatgctacattttatcctgaggttgctagttatttagtcaaatatagtgagtataatcactacaggcttagagtaaatttccatgtcaagaggtagaacacatttattctgtaatattgaatcctgtaatattgaaaatcaaaaacagcccttttttttcttctgtagaaaataagatttttaaggaaggcagcaggaaaatagaacaagtgaatattttacgttcttagtggtttatggttggcagttttcccccaacattttgttacgaaaagttaaaatgtacagaagaattgaaagacttatacccaccagctagattgtgccattaacatgttgctgtatttactttatcactgtccatctctctgaccatctatttgtccctctttccatccatcagtctgtcttttttttggtaagcatttcaagtaagttgactggcaatttttctaagcagctgtatctttattttgttactgtttttttcctggatgttgtaattacagtgtcaagacatttaataatgcacatgtttcagctaacccttttcccaatttctagaaatctgagattgccaataatccctgtcaatcttaaattattttttaattctggtaaatagtgtcaaacctgattagtgccctctttctcaattgttttgtaatccagacaactgttagtcattaaaacataatttatagtggttttaaagcatgattttctaaaaaawtttaaataaatatttattcatattatgttgttttcagagtggagagatctacagaccaagtaatcaagccagtcaatgtaggagctctatcaaaatgggttgggaagataccgccagatgttttacaagacatggcagtgattgctcctatgcttgccaagcttggatatgacccatatgccaacccacctaactacggaaaacctgatcccaaaattattgaaaacactcgaagggtaagtgagattttttaaagcaactgagaaaactagattttgaatttgggatctgaatacgtttttttcttattttatttcttgctatttaatgatcagaaaaatatattttttttttttttcatttatttttattttattttattttattttttttattatactctaagttttagggtacatgtgcacattgtgcaggttagttacatatgtatacatgtgccatgctggtgcgctgcacccactaatgtgtcatctagcattaggtatatctcccaatactatccctcccccctcccccaaccccaccacagtccccagagtgtgatattccccttcctgtgtccatgtgatctcattgttcaattcccacctatgagtgagaatatgcggtgtttggttttttgttcttgcaatagtttactgagaatgatggtttccagtttcatccatgtccctacaaaggatatgaactcatcattttttatggctgcatagtattccatggtgtatatgtgccacattttcttaatccagtctatcattgttggacatttgggttggttccaagtctttgctattgtgaatagtgccgcaataaacatacgtgtgcatgtgtctttatagcagcatgatttatactcatttgggtatatacccagtaatgggatggctgggtcaaatggtatttctagttctagatccctgaggaatcgccacactgacttccacaatggttgaactagtttacagtcccaccaacagtgtaaaagtgttcctatttctccgcatcctctccagcacctgttgtttcctgactttttaatgattgccattctacctggtgtgagatgatatctcatagtggttttgatttgcatttctctgatggccagtgatgatgagcatttcttcatggttttttggctgcataaatgtcttcttttgagaagtgtctgttcatgtccttcgcccactttttgatggggttgtttgtttttttcttgtaaatttgtttgagttcattgtagattctggatattagccctttgtcagatgagtaggatgcgaaaattttctcccatgttgtaggttgcctgttcactctgatggtagtttcttttgctgtgcagaagctctttagtttaattagatcccatttgtcaattttgtcttttgttgccattgcttttggtgttttggacatgaagtccttgcccacgcctatgtcctgaatggtaatgcctaggttttcttctagggtttttatggttttaggtttaacgtttaaatctttaatccatcttgaattgatttttgtataaggtgtaaggaagggatccagtttcagctttctacatatggctagccagttttcccagcaccatttattaaatagggaatcctttccccattgcttgtttttctcaggtttgtcaaagatcagatagttgtagatatgcggcattatttctgagggctctgttctgttccattgatctatatctctgttttggtaccagtaccatgctgttttggttactgtagccttgtagtatagtttgaagtcaggtagtgtgatgcctccagctttgttcttttggcttaggattgacttggcaatgcgggctcttttttggttccatatgaactttaaagtagttttttccaattctgtgaagaaagtcattggtagcttgatggggatggcattgaatctgtaaattaccttgggcagtatggccattttcacgatattgattcttcctacccatgagcatggaatgttcttccatttgtttgtgtcctcttttatttccttgagcagtggtttgtagttctccttgaagaggtccttcacatcccttgtaagttggattcctaggtattttattctctttgaagcaattgtgaatgggagttcacccatgatttggctctctgtttgtctgttgttggtgtataagaatgcttgtgatttttgtacattgattttgtatcctgagactttgctgaagttgcttatcagcttaaggagattttgggctgagacgatggggttttctagataaacaatcatgtcgtctgcaaacagggacaatttgacttcctcttttcctaattgaataccctttatttccttctcctgcctgattgccctggccagaacttccaacactatgttgaataggagcagtgagagagggcatccctgtcttgtgccagttttcaaagggaatgcttccagtttttgcccattcagtatgatattggctgtgggtttgtcatagatagctcttattattttgagatacgtcccatcaatacctaatttattgagagtttttagcatgaagggttgttgaattttgtcaaaggccttttctgcatctattgagataatcatgtggtttttgtctttggctctgtttatatgctggattacatttattgatttgtgtatattgaaccagccttgcatcccagggatgaagcccacctgatcatggtggataagctttttgatgtgctgctggattcagtttgccagtattttattgaggatttttgcatcaatgttcatcaaggatattggtctaaaattctcttttttggttgtgtctctgcctggctttggtatcagaatgatgctggcctcataaaatgagttagggaggattccctctttttctattgattggaatagtttcagaaggaatggtaccagttcctccttgtacctctggtagaattcggctgtgaatccatctggtcctggactctttttggttggtaaactattgattattgccacaatttcagagcctgttattggtctattcagagattcaacttcttcctggtttagtcttgggagagtgtatgtgtcgaggaatgtatccatttcttctagattttctagtttatttgcgtagaggtgtttgtagtattctctgatggtagtttgtatttctgtgggatcggtggtgatatcccctttatcattttttattgtgtctatttgattcttctctctttttttctttattagtcttgctagcggtctatcaattttgttgatcctttcaaaaaaccagctcctggattcattgattttttgaagggttttttgtgtctctatttccttcagttctgctctgattttagttatttcttgccttctgctagcttttgaatgtgtttgctcttgcttttctagttcttttaattgtgatgttagggtgtcaattttggatctttcctgctttctcttgtaggcatttagtgctataaatttccctctacacactgctttgaatgcgtcccagagattctggtatgtggtgtctttgttctcgttggtttcaaagaacatctttatttctgccttcatttcgttatgtacccagtagtcattcaggagcaggttgttcagtttccatgtagttgagcggctttgagtgagattcttaatcctgagttctagtttgattgcactgtggtctgagagacagtttgttataatttctgttcttttacatttgctgaggagagctttacttccaactatgtggtcaattttggaataggtgtggtgtggtgctgaaaaaaatgtatattctgttgatttggggtggagagttctgtagatgtctattaggtctgcttggtgcagagctgagttcaattcctgggtatccttgttgactttctgtctcgttgatctgtctaatattgacagtggggtgttaaagtcttccattattaatgtgtgggagtctaagtctctttgtaggtcactgaggacttgctttatgaatctgggtgctcctgtattgggtgcataaatatttaggatagttagctcctcttgttgaattgatccctttaccattatgtaatggccttctttgtctcttttgatctttgttggtttaaagtctgttttatcagagactaggattgcaacccctgcctttttttgttttccatttgcttggtagatcttcctccatccttttattttgagcctatgtgtgtctctgcacgtgagatgggtttcctgaatacagcacactgatgggtcttgactctttatccaccttgccagtctgtgtcttttaattgcagaatttagtccatttatatttaaagttaatattgttatgtgtgaatttgatcctgtcattatgatgttagctggtgattttgctcattagttgatgcagtttcttcctagtctcgatggtctttacattttggcatgattttgcagcggctggtaccggttgttcctttccatgtttagcgcttccttcaggagctcttttagggcaggcctggtggtgacaaaatctctcagcatttgcttgtctataaagtattttatttctccttcacttatgaagcttagtttggctggatatgaaattctgggttgaaaattcttttctttaagaatgttgaatattggcccccactctcttctggcttgtagggtttctgccgagagatccgctgttagtctgatgggctttcctttgagggtaacccgacctttctctctggctgcccttaacattttttccttcatttcaactttggtgaatctgacaattatgtgtcttggagttgctcttctcgaggagtatctttgtggcgttctctgtatttcctgaatctgaacgttggcctgccttgctagattggggaagttctcctggataatatcctgcagagtgttttccaacttggttccattctccacatcactttcaggtacaccaatcagacgtagatttggtcttttcacatagtcccatatttcttggaggctttgctcatttctttttattcttttttctctaaacttcccttctcgcttcatttcattcatttcatcttccattgctgataccctttcttccagttgatcgcatcggctcctgaggcttctgcattcttcacgtagttctcgagccttggttttcagctccatcagctcctttaagcacttctctgtattggttattctagttatacattcttctaaatttttttcaaagttttcaacttctttgcctttggtttgaatgtcctcccgtagctcagagtaatttgatcgtctgaagccttcttctctcagctcgtcaaaatcattctccatccagctttgttctgttgctggtgaggaactgcgttcctttggaggaggagaggcgctctgcgttttagagtttccagtttttctgttctgttttttccccatctttgtggttttatctacttttggtctttgatgatggtgatgtacagatgggttttcggtgtagatgtcctttctggttgttagttttccttctaacagacaggaccctcagctgcaggtctgttggaatacactgccgtgtgaggtgtcagtgtgcccctgctggggggtgcctcccagttaggctgctcgggggtcaggggtcagggacccacttgaggaggcagtctgcccgttctcagatctccagctgcgtgctgggagaaccactgctctcttcaaagctgtcagacagggacacttaagtctgcagaggttactgctgtctttttgtttgtctgtgccctgcccccagaggtggagcctacagaggcaggcaggcctccttgagctgtggtgggctccacccagttcgagcttcccggctgctttgtttacctaagcaagcctgggcaatggcgggcgcccctcccccagcctcgctgccgccttgcagtttgatctcagactgctgtgctagcaatcagcgagattccgtgggcgtaggaccctctgagccaggtgtgggatatagtctcgtggtgcgccgtttcttaagccggtctgaaaagcgcaatatttgggtgggagtgacccgattttccaggtgcgtccgtcacccctttctttgactcggaaagggaactccctgaccccttgcgcttcccaggtgaggcaatgcctcgccctgcttcggctcgcgcacggtgcgcacacacactggcctgcgcccactgtctggcactccctagtgagatgaacccggtacctcagatggaaatgcagaaatcacccgtcttctgcgtcgctcacgctgggagctgtagaccggagctgttcctattcggccatcttggctcctcctcccccagaaaaatattttgaattagaaaaatttgggcctagtggcctggcacgctggctcatgcctgtaatcccagcactttgggaggtcgaggcgggtggatcacaaggtcaggagatcgagaccatcctggctaacacggtgaaaccccttctctactaaatacacaaaaaattagccaggcgtggtggtgggcgcctgtagtcccagctacttgggaggctgtggcaggagaatggcatgaacccgggaggcagagcttgcagtgagtagagatcacgccactgcactccagcctggatgacagagcgagactccatctcaaaaaaaaaaaagaaaaacttgggcccagcatagggctgacacctgtagtttcagcactttggaaggccgagatgcgagtgagcccaggatttcaagactagcctgggcaacatagtgagacccccatctctacaaagaatataaaaattatccaggcatggtggcacatgactctagtcccagctacttgggaggctgaggtgggaggattgattgagcctgagaggtcaaggctgcagtgagctgagagtatgccactgtactgtagcctgggtgacagagcaagaccccgtctcaaaataagaaaaaagaatgaagaaaaattatatttgtagaatgctttcttatcagcagtcttccactgcattttaaggataactggctcgttggggatagttcttagggtattttgctcagtttctaggaatgatactcactgttgggagatttattctcagccaattactgcagatctgcataaacaccataattattagtgaccttacttctgatttctttctttctgtaaatctaatagccactttacttttaaacctttgtttagatgaggcataatttttggatacctaaaagctaaacattggttacactagaaaaattattaaacactagccttctgattaagagaaagttgctattaaagtgacattacagtttttattttaataagttatgctcacgtctttacaatatattatttcagaaagtgctgaaaattcagagctagattatatagcctaccagttgagtctatttcaaatcagatcttatacattcttttctttattgcagtaagatatatttaacataaaatttaccactctgacactttttaaagtgcacaattcagtggcattaaatacattcacattgttgtgcaactgtcaccaccrtccatctccagaacattttttgtcttcccaaactgaaattctgtacccatactcttcattgcctggtccctgtcaactgcagttttttgtgtcacttgtatatattcttttttgaaactacatttcaaataagacaaccatgctagcataagttcactgataggctatttgattccaaggtgaaaattccttggctttgtctgatattctcttgtttatatcagtgtccttccctccctacaaccatataaccgtatcatgtttttattctgtcttttgataactttaattgacaaatttatgccacatttatttcatgagattaatttctatgtgaattcctttctcttaggtattacttttatttccccttttcaattcattattagcagctatatgggaagagctgccttcttgtaaaccatcacatatgagggcaaattaaaaaaaacaataatcgctatcctctttacactttttatatatatataaatatttccattataaaaatataagctcattatatgaaacttacaaaattcaaaggataagagaataaaaatcacctgtaatgttcccacctagacacatacacatattattcttttttattttcttatttatttacacatattattcttaatattttgatgtattttctctccwctgcattatgttaaacaaaggtaagattacgtatatcatcttacctttatatacacagttttgtatccagtccttttaatattcacgagcattttcccattgtgtgcatgctttttaaacataatttttatagttataaaccttcatagaagccaccttaaattctttctgaagcacagtagtaaatgaatgaataaatcaacaaacaaaatacatttccctggtagatgttctacaattgattttaccattttgttgtttaccgttttctctttgacaaattgtgctgcagtgaacatctttgcagatactcaattttaggattttttttttaaggtaggatcaataaaaatagaactaaaccagggtaaagtatctgagatttttaaaaggtgtttgatatctattgatactaaaaaacctttgggctggccacagtggctcacgcctgtaatsccagcattttgggaggctgaggtgggtggatcacttgagctcaggagttcaagaccagcctggacaaygtggcaaaaccccatctctacaaaaaatacaaaagttagccaggtgtggtggcacatgcctctggtttcagctgcttgggaggctgaggtgagaggattgcttgagcccagaattttgaggttacagtgagctgagattgtgccactgcactccagcctgggtgatggagcgagatcctgtctcaagaaaacaaaaacaaaaaacaaacaaacaaaaaacctttgaactgccagcataattgaggtaatttattttagatttttgttggttttaatagatttcattgattaatgtaattgaacattttccagttattagctatatgtatatattcttttatgaactaagtttttactttatttatttgagacagagtcttgctctgttggcacaatcttggcttactgcaacctgtgtctcctgggttcaagtgatgattctcttgcctcaggtgggattataggcacatgctaccacgcctggctaattttttttaattttttatttttagtaaagttagggtttcgttgtgttggcctggctgatctcaaactcctgacctcaagtgatctacctgccttggcctcccaaagtgctaggattacatgagccactctttaaagttttatatgtattaaagttttgtgagctctttgtaattggtaattcatagctatctcctttgcacaatagtgaaagggttttttattaccaagatacatgtacaatgctattttgagggttcttaggcagtagacattatagttttcctacatgcaaattggcttggctagattatcctttgctttcttgagtggtgggttgggaagaatgctatggtttgaatccatgtgactaaagaatctatttcatacacacttgtggtttttgaaaggatttcaaaatacccactgaaattaaaaaacacccacccttcccccccccctcccccaccgtctctgcctatctttaaagtgacagataattttgaggaagaaaagatgaagtgtgaactatagtggtgtttttgggccttttgtggtaatgcatacaaactgacagtcttgtcttgtgagggtaggtttcataagacctttttgcaaactaaatcctgtgtatcttcaaagcttttttgcctgtaataagtcagatgctaatgtatccagcactgatgatcatgaggtttttgtaaagcagtgcttgaaaagagattgttgaccgttagctatgatatgagatgggccccagagaaagaggtggctggcgaaggtgttttccttagttatggggtgagagtgggagaaaaataacattttgactgagaatataggatttatatctctaagccyaaaaatactgggktggtttttttttttttttttttttggtacaattctgggtagtctgcaagtaatattgagtcagcacattttagggacatattacccaatattgaatggataatcatgcttcatggttactgtgactcacatagtaaattggtaatgaaacgttaacatattttataccctgtcccmccatagtctctaatcctaaaattatagtatatttcagtaaatggtgctgtctaggttacatcgtcagccttcttgcatagattcttaaccttttagacttaggaacttatttgagaatttgatgaatcctgtggatccccacctcagaaatacagacacatgaatacacagatttcactcacaatttcagtggatacatagatataccagaagtccatcagattaaggactcctattagccacaatttcagtggatgcatgtgtgccagaagcctgacagattaaggactcctattttatagtctccttgctcaagctcatccactcatagggctttcattacagcctatttgctgattatcataaatctgtatttcctagtgggtctctttcctgagccctaggttcattatttccaactgtcttctgtatgtgtccaccgaaatgctctcaaggacctcaaattcaaagtccaaaattgaatttattttctaaacttgttccctgagaggcagaagctaggtggaattgttcattaaactgagcaggaatccaccttgagagtggggatgatgctgtgctcatctatacttgcggtacctatgagccagagagcagatttgaggaacagagtcctcagggcacatggctcaaaccccaaaacaattcaagaacctggttgctaaagttagagagctgaaaagcagatccaatttatgaatggaatatttagttggaaacctgagtagatagtactgaggaagagcaagtgatcaaatggaaaagcatgtaccaaggtgcagaacccacagtaacagacaagaagaaacatgaaaatgaagtcagctgggggacaggggttagattaaatccctaaaccaaacaacaaaaagctgcagcagcagttggaattgatattcttacattaaaggtaaagcctggaatgaatgcatacttgtgttttctggttcctatactcagcaaaaactgcttgttcctgtttttttctatctccatacatagcatgcttattcacccagttacccaaattaggtctcctcacttaaaattcatgaatgactccactgttactacaggatagagtctagacttcttagaatgacatwtacttttctagtatttgggtattttctcattatctttttgttgttgatttctaatgtgaccattatggtcagagaacactcattatggtttgtttcagtcctttgaaatatattgaatattgttttatggccagtatatggtcttatgtgatcagttgaaaaaatatgtattctgtgattgttgcagagttctgtaaatatcagtgaggtcaagaaattttatagtgttgttacagtctaaatcttatttgattttttggtctgctttattaatgttgggaaaattatgaatttttcaaattttccttacatttctagcaattttgtttcatgtatttaggatctatattattgggaacacacccatttagaccttcttgaagaagtaactcttttgtaattatgaaatatttctctttatctctgctgttaccctctgaaagtctactttatctgatatgaatatagccacaacagtgtttttatgtatactatatacatggtatattttcccgattcttttacttttaatctgtgtctttatatagctggctttgtttgttaatccagttttatagtctctgccttttaaatggagagttaatccacttacatttaatgtaattattcatctgattggatttaaaactaccatcttgctatttgttttttatttggatcatctatttttgtttctttgtttctcttttcctgccttcttttggattaatcttttttggtattccattttatatattatctcctctttttagctatacctcttctttttgttttgtttttgcttatagtggttactgtaagacatgggctgcacattttttatattgtaaaaatccagatagtaggccgggtgcagtggctcacacctgtaatcccagcactttgggaggctgaggcaggtggatcacaaggtcaggagatcgagaccatcctggctaacatggtgaaacccccgtctctactaaaaatacaaaaagaattagctgggcttggttgtgggcacctgtagtcccagctacttgggaggctgaggcaggagaatggcatgaacctgggaggtggagcttgcagtgagctgtgatcactccactgcactccagcctgggcaacagagcgagacaccgtctcaaaaaaaaaaaaaaatccagatagtaaatatattatgctttgtgggccacagttgggctctttgttctttacttgaagatccagattttcatctggcatcatttctctttagcctgatgcacttcctttagcagttcttatagtaaagacatgttgactactaatgctcttaggtttttttttttttttttaatttgaaaatgtgtttgttttttttttaatttgagaatattttgctggacatagagttctaggctattggtcgttttgtattttttttaactttcaacattaaaaagatactattttattggcttcccatgtttttgatgaaagtcagctgacattcttatgaatgtaattttttttctttgactgctataagatttttccctatttttggttttcagcagtttgattataatataccaaattcgtagctccgttctactgccatctcctgtgtgggcctcagttttgattagtttttattagcctacctttgaattcattgatcccttctttttctgtgtccagtctgctgttaaacccatctggtgacttmwtcatttcagatcatttatttttcagttctagaatttccctttctctgctggaattctttgctctttacccattctgttgatcttttcctctaaattatttaacatattcataataacttttaaagtcttcatccacggatctctccctgttgactttgtttctttattatgggttataggcacaccttggagagactgtgggtttggttccagaccaccaaaataaagtgaatatcccaataaagcaagtcacacataatttggtttcccagtacatataaaagttatacactacattgtagtctgttcagtctgtagtagcattrtgtcaaaagaaaacacaatgcatatgccttaatttaaaatactttattgctaaaaaaaaaatgctagcaatcatccaagccttcagcaagtcataatcattttgctggtggagactcttacctccatgttgatgactgctagaccattcagggtggtggttgctaaagattggggtgactatagcaatttgttttgttatgtaatattctatatcctttgctgtcttttcaacaatattcacagcatcttcaccaggagtagattccatctcaagaaccactttctctgctcattcttaagaagcaactcattcattcaagttcaatcataagattgtagcaattcaaccacatcttcaggctcacttctagttatagttcttttgctatttctaccacatctgcagttccttcctccactgaagtcttgaacctctcaatgtcatccgtctgattcttccaaattcctgttaacattgaaattttgacctcctcccatgaattacgaatgttcttaatggcatctaaaatgatgaaccctttccagaaggtttgcagttgactttgtgcaaatccatcagaggagttggtatctatggcagctatagtcttaagaaatgtatttcttaaataataatcttgacagggccaggtgcagtgtcttaaacctgtaatcccagcactttgggaggccaaggtggatggatcacctgaggtcaggagttcaagaccagcctggccaacatggcgaaactccatctctactaaaaatacaaaaattagctgggtgtggtggcgcatgtgtgtaatcccagccactcaagaggctgaggcaagagaatcgcttgaaccggggagggagaggttgcagtgagccaagattatgccactgcactccagcctgggtgacagagcgagactccatctcaaaaaaaaaaacaaaaaacaaaaccaacttgacagtagaaattactccttgatccrtggactacagaatggatactgtgttagcaagcatgaaaacagcattcatctccttgtatatctctatcagaactcatgggtgacaaggtgcattgtcaacgagcaatagtattttgtgagaaatcttttttcctaagcaataggtctcaacagtgggctgaaaattgcatttttatgttatggagatagcttctttccttaatcttcataaacaaacaacctctactagcctccaacttttcctctcacagcctttataaaattgaagagaattagggccttgctctggattaggctttggcttaagggaatgtcatggctggctttatctgtctagtccactaaaacttttgccatgtctacaktaagactctcactttcttaccacttgtgtgttcattggagtagcacttgaatttacttcaagaacttttcctttgtattcacaacttgactatttgatgsaagaggcctggctttcagcttatcttggctttcaacataccttcctcactaagcttgattgtttctagcttctgacttaaagtgagagatatgcgactattcctttcrtttggacacttagagcccattgttggattattaatcggccttttttcaatatcaatgtgtcacaggaacagggaggcccaaggagagggagagagatgggggaacaaacagccagttggtgtagcagtcagaacatacacaacattgattaagttaattatgttatatgggcttaggatcgtggcaccccaaaacaattacatggtaacatcaaagatctctgatcgcacatcaccgtaacagatacaataatgaagaagsttcaaatattgcaagaattaccacagtgtcataaagagacatgaagggagtgcatgttgttggaaaaatgtcaccaacagacttgctcaccacaggattaccacacaccttcaatttgtaaaaaacacaacatctgcaaagcacaatgaaatgaggtatgcctgtactcatttgcttcttcacatgtcttagaagttttaactgcatactggaccttttgtataacagaggggtagagaatgaactaggtaatactttttgttttatttttgttaaagagagcagttctttcctccagcaggtagctaaggtgatcactcaaatttgacagtgaatcaagctgagctggggctgagcagtagctttaattgatttcagtttgcctctggattcaaatgagawtaaggaaatttgacttttagcccaaccttagctttctatatcatttagacgaggggttcatttctttgattttagcaagattgcagctgggaggcagttgggttgaagattaaattaatttactttacctctggattgcaactatagcagggccctggaacccaagcaccacacagcattgggagatctctttctgtctctcactgtgctcccaccagcacttactaagattctcttgtagtattacatgtaattgtcaggtcaagagatttgtttttacacttgggactctttcagattctaattaatcataccagtccacagtctcactaaaagtttggcttgtttcagcaaaatctttccacctatgggagacctccttttctgcccacttgtacccagacaggcaattgattcaaggtagctagaaacaggcttttgtttctctgtgaagaactcatccttctccagaaattggctcagttagacttcttggcattcatttactgctttttcatggctttacagaaaagtatgaagtttagtttatctggtgttttcttgttttgatgagagcagtggtcttttgggatcagctgcattcaaaccaggttggaacgctttagaatgatggcattaagattctttgccttctgctttcaaccttccttttcaacctcatctctttttattcttttaaccacaccacagtgcctccctttcattcccacagcacattgtatacctccatacctttgttccttctgccttgattgtccttcttctcatcttacaactttgtcctttraaactcaactcacatgacacctcttctgtgccacagatcctcctgctacaatgtacctacctttacttgtgtactttcacattatattgtgatgatttatattatatgctgctgcttttaaactaaggacatgccagacatgccttcatctgaaaatgttaatatagttcaaagtgttgctatagtctttgtttagttaaagtaacaactttctggtctgaaaaaaaaaagactatgcatcccttcaacagaataagatagttttaaaagtaatgatatgggagcatctcttaagatatggtcagtgttatgttttaccatttgtatttagaaaaacagctgtgtgtgtatgtatgtatgtatgtatgtattttaatttattttgaaacggagtctcattctgtcacccaggctggagttcagtggtgcgatctctgctcactgcaacccccgcctcctgggttcaagcaattctcccacctcagcccctagagtagctggtgttacaggtgcatgccaccatgcctggctaatttttatatttttagtagtgacagggtttcaccaagttgcccaggctggtctgaagctgctgacctcaggcgatctgctcaccttggcctctcaaagtgctgggattacaggcgtgagtcactgcacctggcttgtatatgtagttttttaaaaaaataaataagtaaagacttttcaaggacaaagatatcatttgcattttgtagcctgagtgccagtaatacttgacaattacttgatgctcaataaaatgattcttattagcaaaataaaccttacacgtagaaaaagaatatgccaggaaccaagaaaagggatattcagatatgaggctcttggagttacggctcagctcacaaggattctgccgtaggtgagaaatgctccattacccagaggcaaagccccagaggttgtggcagcactttatgactatgtatcagtctgggctcagtcagggaaacattgagccactgttaagtgttataggagtgaggggtttaatatagtaattaaggcctrtgcaaatatgggaggactagagaagtgaaggtctgcacgttttttattgtatactggacacgttgtttacaataggagtagggaatgagctggatacagctacagttggaagaccagaggaataggcactgatgactgaaacctgcagctctagagagggcagagaagtgctaggaaactgcctctcgctgccaaagtaggactcagtgtgggatcccaaggaaaggtctgtgaagactgccacggggataaagtggagctttaggagaggccagtggagcgactgcatctgactgccctgacctcttaaaaataatggcttctacttcatttccaccttctaaaactcacagaagcctctgacccagaaccacacagggaaaggaattctgggagacttaattttctgtcctagacaacagtggtggtggtgccagttgaccatccagcataggccattcctttgccagcctggcttacatacacacctacttaaaccatatttaactgccagataaagctaaatgctctgcttaacatgttgtaactatcgcttagcaaactgaaaacatgctaagcactccctcaaagaggagatgctgtatttcatattgtgctttgtacatttctggctgatatgaatgtattccactagctgagtcacatcccctctttgatatcctaaaacttacatatactgagatacagagttagccatttcctttttttttttttcttggcaaggtcttgttctgtcacccaggctgcagtgcagtggcgccatcatagctcactgcatccagaayctcctgggcccaagcgatccgcctgccttagcttcttgactataggtgtgcaccaccacacctagctaaattttttttatttttaactttttgtagagacaagaggtatcactgtgttgcccaggctgctcttgaactcctggcctcaagcaatcctgttgccttagcctctcaacgtgttaggattataggcatgaaccaccgtgcccagccagagtcaatacaccttatattagagagtattattagacagggaaaagtggaaaaaagaattcgttaatatattcagtatatattcatatcaaagcaaagaagaatatctgccaaactattgtagttctcattttctgtacctttcatgtgatcatggcaggtatctgtcatttctttcttcctctagccattccatgttcctttggtcctcagtagtcacctcagatggtctttgttctttgcctggtggggtggcctaaaccttcattctggrgtgtatgtaccaataaatggccatattgttttgctctaatatcccgttaactttccataataaacaagtgtaatagaaaatcctaggttccaggcaatttctttccttcttccattgagtatttttttcccattgtgtattttaaacttggttcttccttgataatcgggatcaatcagcctagctattatagtacctgccttacttgtctttggctaagtggcatgaggagcaagaagtgctgagttaacagtctcagytctctgttcagtggaaataatgttgtgtctcccccaaagaagcacttctcccttgaggattaagacctgtaaactgggagagcccacagctgctgcgagttttcttttggggaaggattttgataatatttagtgaatatagggctatttcgattttcttgttcttgtatcaattttgataaattgtattttttaaagtaatttggccatttcacttaagttgtcaaatttgttggcaggaagctgcagtattttcttagagtccttctaatctttgtcaaattgatagtgataacttttctattcctcatgtgatgaccccttgattccgcctctgtccacacctgttagtgattccctccacctgaatgtggacaggacctgtgacttgcttggaacgaatagaatacaacaaaggcgatgggagatatgtgattgcatgattatattatataagattacagcactggactggctggagtgtgcacgtctctctctctctctctctggacataaagactgttatcttgtatagactctgggttcctttataatactcttgtgaatgcatttacttttgttttagcaggcaatcaactcaggtaggctggattatacattgttttgccttttgcaggcagtgattcaaatcccaattcagttatcaaagcaaagcctttgctaaactggtttgggtttgtcctgtgcatgtgtgattcagaggttaaggtgagacccgtgtaggtgcatacataaaagtggagagctccttcacctgctgtttctgctccaggagtttgctctgactccctgtctttctttggctcctttccctgcttsctctgaccagaaagaaaacaattcctatcagagttttagccacctacgtgtgctgcttagtgactgaagctgtcccaccctcaaggaaaaacttgatgagaaaaaaataaacaaacagaaaactcaccctgtaaggtcacttctccaactttttacttccctccacaatctgcctgcttttatttactttccagatcctcatatagttttttgttttgttttgttttgctgtgttttgagatggagtttcactcttggtgcccaggctggagtgcagtggcacaatcttgtctcactgaaacctccccctcccgggttgaagcgactcttttgcctcagcctcctgagtagcttgggattacgggcagccgccaccatgcacggctaatttttggtatttttagtagagacagggtttcaccatgttggccaggctggtcttgaactcctgacctcaggtgtcccacccacttcagcctccccacagtgctgggattacaggtgtgagccaccgcgcctggcccaaggtagttattttttaaaagtttgctcaaactttatagttgtaattagagggaggaacaactttatgggatgtaggtggcttaacctcaccataatggaaccaaaactccacttcattcactttttttttttagatggagtctcgctctgtctgcagtgatgagatctcggctcactgcaaggtccgcctcccgggttcatgccattctcctgcctcagcctcctgagtagctgggactacaggcgtctgccaccacgcccggctagtttttttgtatttttagtagagacggggtttcaccgtgttagccaggatggtctcgatctcttgacttcgtgatccgcccgcctcggcctcccaaagtgctgggattacaggtgtgagccactgcgcccggcccacttcattcactttaaaatgaagtacttgaccagaagcagtactgtttagaatgccattatggtgaataagatattttgtaagggaaaggatgctggtttttgacagaaatgttgtgggcagagaaggaaatcttcattgagtaaaagcagtgtcctttttagatggaagcggtccagtgtgatcatcctgctacagatggctgcccagaccccctgggagcagcgctttattggggcaccattgttggcctctcctgttggcaggttggacacttagccatgattgttgccaggtcagccttgacaggtggaagcctgtgtcactgagcacatgcatgaccttcattcctgytgctctcacagtaggatatgaactttgttcattagcgttctgagcaagggaaacagtggctgataaaataatgagtcattttgtccacttggttattgagagcctcctctgctgagattatacattggtcatcatttacatgggacacaaataccctcacactttgtcctgtttgagaatagtttattgacatagctcttttctatatcttaccacaagtttcccaaccttattctaagtttctgaatttccagtcaaaccatctgctgctgaccacaaatcagtgtggattcgtatttatagccatcactcctttgacacaaaatgtgcagtcatgtacactgcttcgagtgtatgatgagcagcctaagcgacttgggcaacttggtagccagtggtaaagtgttcagtccttactaaatcctagtagcaagcaagggctctttctcaaaagggagagtaatgatctccagaagttagcatagctttgctctaaaatcctagggttctatactgtgatttacctctagggcctgccatacctccacacatcactcatgaagtatcatcctgtatcttaagtttttgttggcgatactaatctctgcagttcctctaggaatgcagtattacttttggtgtaatattttggtagagagaggcagctctaatgtaacccctgaggtatggctttagtatgctacccatctctgttagtcctagggacaccatcaccaatcagccaccaccagagatctctacagctcacaccattctcttttcctactctacctctgcgtgtgcttataaagtatagccatgtgcccattgtttctgtcatgaagcgtcaccagttggctgctgtgactcagagatcttttcatccttcccttgggttcagggaatctatttctctgacagcctttcccattgttatttctagcctgcagcgaacaagcactaaagagctttttagggatgttgttgcccccttcaccaatgtatttctcaaaggcttggtaaaggagtgagttctctagacattcctgggatgtagttaggagatcagtgaacagatcagtcatacgtattaaatacacyccagtattccttattttctaaccttttgaataaattttattttgagactgagttttgctcctgttgcccaagctggagtgcaatggcactgtctcagctcattgcaacctctgccttccgggttcaagcacttctcctgctcagtctcctcagtagctgggattacaggtgcccgacaccatgcccagctaatttttgtatttttagtagagacagggtttcaccatgttggtcaggctggtcttggaactcctgacctcaggtgatccacccaccttggcctcccaaagtgctgggattacaggcatgagccactgcacctggcttgaacaacttttatttacagtataccaaggaggttctggcatctaagcttcatttaatgtaagccactgatggatccaggttttggccaaccaggtgaggaaattgttagagttattccctgattactcaagccaatatactgcatccaaaatatctggttaatgtactcatatattgataaatttgaccaagtccaacgttacattccttcttgtctggtctaacattcttaggattcattgctacacacttcctaggtttctgcaagtacaaatgggcaaaatctagcacaatgaccctagccctctgagggtcacagcaggttggttcaggagtaggaacctgacccaacacaggcaaataaaggtctttccctgggactgtgaaatggtaccaagggaagaaaggtggtttctctctggtagggagggccactggatataaggcacaggaactgttgctggaagcgttagacactgctgactgcttgttcctttttccctgttagtaaagactattcctttaaaaaaccaaaaaaggtagataaaaatgccagatattcattttcccatatactcttgtgggtggaatgaccacttgaccatttttttgtagccagtgatacataaggagatttttttttaacagggaaaaaaagagcttacaaattttatgtgcacatgtgtgcatgggagttatacaattcttttaaaaaaaaaactcaaatggctagatgattgacacttttgtaccaccctgagatacagaaagaataggggcttggatcatggccaaacaagttatggtggcaaaacaggttatgggaggaagagaagaccacctttgcctggctagcaaaggtagtcttgaactctcacaggcagcagccctcagaaagaatggatagtagccagtgataaatgtttctagcagacctttaaaggtgttagactctcagttaatcattcttaggtctggataaggagatgtttgctagggattttctgggagagatttagctttctgagaaaataaagaattgtgtgaaaagagcttactctttccttcctgcttttgaacattgctgtgaaagaacattatgcttagccctgctgcagccactttgtgatcctaagagaagttatcatcaataacacactgaaggtgacagaaggaagattagggcagaggcttcccttgatttctgggcttaggactgtccatccacctcatgtctggacttcttgttatgtgtttgacatacttgtactcagttattctattaccgtgtgttcactgcaaatggggtcgtgttcctcagtgtgtaagggaataaagccaacccatcgagagaagcagagccaaagaggtcaagggagtgtctggcaggggttgaggtcctggttctggttgcccatgaagatcatttccagctctgcccttgccacagttccaggaaacatttccctttttgactgtattacttgaattgggtttctgggctgtagtaggaatattccaactaataccatactgggtaaatttgaagtatgataaattttaagctacttctcactttatttcttgtgcctaaatttgaagagtatttatttatttatttatttatttatttatttatttatttatgagacagggtctcgctctgttgcccagagtgctctggaatgcagtggcacgatcatagcttactgcagccttgacttcttgggctcaggtgatcctcccaccttggcctcccaaagttctgggattataggcatataggcatgagccactttgtctggcctaaattttagttaaagaaattcttatctcattctttcagaattttcataggccttcaaagcaacaaccatggagttaaattcatttcctcaacttggcaggattttttttttcccctattgaagtattttgtcttttttttktgtgtgtgtgacagggtttcactcttcgctctgttgcccaggctggagtgcagtggcatgatgatagctcactgtagccttaaactcccctgggctcaagccatcctcccacctcagctccctgagtagctgagaccataggcatgcaccactatgcccaactaattattgtattttttgtagagacaagatgtcaccatattacccaggctggcctcaaactcctgagctcaagtgattcacctggcccggcctcccaaagtgctgggattacaggagtgagccactgtgcccagccattttgttttattttgaaagaaggctgaattgattcctgcaggcattctgtaaagaatatataaggaagttcaaagtagcacattttaccatctctcagaatacctcagtctttcttctgatgcatcactttaaggcttcgattattaaacaagcaattactaaacagttgctttttggaatactaccttctagtgcttcaggagatgcaaagatctggcttgtatccaggaagaaaatacaggtaattggattggagagagaagacatgccatagaagaaaatgaaataataataagatgggagaagaatttttactgtgttttaaagggttaaaaactgttggaaacctaaaaatttgtccacaggacgaggctgaaagtctgagactaccccacaggaatagccttgtcaaggcctgattgtgccctttgactcatccttcaaagtcaaacctttctcatcttctctcccagctttggcactgtcattccataagtgtatcccaataatttgtgttttctgccagaaatccttttggggctaatgagtttcatgcacttgtatttgctgtgtaaagtaggttttcctatacttgtacttaccagattaaatgtcaaaggatccagctctttgttggttttgtgtacaagcacaaattgcacttgctcatgccattcagaatttcgtacattttagttgtcttttacaactgtaatcccatctgaaggtctatgggaaattcagttccttaagaaataggttcccctcatccttctctttctgccttcattagtgagagtactttttgagagcaagagaacatttgcagtgaagaggtttagttggatagctatttatacagttttccttggaattttaaagaatgaaataatttctctttatgtcagcaaatgcctattctgaacattcagaatgactgttctgaacagtaatgtttaactcttaaaaaacatggtatttataaatgagaatataataaatcagtattagaagtcattttttaccccatgctctaattcaggagaaaataggagatacttataggttaacttggtgtctgattaccagtgcctgatataatttctccaattccctttttaaaaatctattaaaatatcgttaatttaaaaaatccctttaaaatgaagatatgaaaagctctatgctaaagaatagggaaattttccactaagtcgatcattgattgtattgtggcttttccttaaacccaaagattacccaaagattactgtagaagtgacactacgaaaaatcaaattaatgatagggagagtatacattagatgctcttccagaatgtacagcaaaagaacagagatgaagattgatagatgagagaaaatgatacctatgaaagaaaaaaatagagatttaactggtgactaatagatgtctgcaaaggagacaacagaagtggaacaaaagcatggatcaaatgtstcattgtggaagactttccagggttgaaaatgacctgaagaataaaagagctcactgtattctaaagaacattatgaaaacgtgtctgtacctagacatattttgctggttttcttttgattttaaggatcctgaaaaaaaaaaaaatcctgcatatatcaaggcacaaaaaaatgagctttcaacaaagaaacaaaaatgatgctggtagccaggcgcggtggctcatgcctgtaatcccagcactttgggtggccaaggtgggcagatcacaaggttaggagtttgagaccagcctggccaacatggtgaaaccctgaatctactgaaaatacaaaaaattagctgggtgtggtggcatgtgcctataatcccagctactcgggaggctgaggcaggagaatcatttgaactcgggaggcggaggttgcagtgagccaagatcatgccataactctccagcttgggtgacagggcgagacttgatctcaaaaaaaataaaataataaaataaaataaacaaattatgctggctacaaaattttcttttgcaaatactaaatgttggaaaatgatggagcagtgggcagtgatccttagcttatgtggtctttgaactccctgcagtaatattkggacctctatgtcttgatgcaagttgattttcctgggaatagaatctatatcgttcctcatattttccaggatttcatgaaacaaagagttaagaactacagtagtggagcaatattcatggtgctttttctttttcttttgaaataattaaaaacttacagaaaggctgtaagaataatacagagaaatcctgtgtattctttcccaaattcatgtgtttgtcttctctctctttctctctccttataaaatatttcaatgttgttagttatctcaaaatggactttgtagtttttttttcctcccctaccagtacaggtttcagtctaagatcacatcatatatatagttttatattgttttagttttctttatctgtaacagtttctcagatgctctctgtcttccatgatactgatatttttttgaagaatgctggcaggttattttacagtgttcctcattctgggtttgtctgatgtttcctcttgattattattcgggttatgcatatgaggccacaatactaggtaaattgtgtggtttcattctcaaggtatccacatctgaaggcgtatgatgttcatctgtcacaccgttgatgttaatttcgatctcatggtaaatgtgttttttcggtgtctccactctatggttacttttttatccctttcaattaaaaaacaatcagtggtcgggcactgtggctcatgcctatgatcccaacactttgggaggcagaggcaggaggatcgcttaagcccaggaactcaagaccagcctgggcaacatagggagaccccatctctactggactggtggcatgtgcctcttgtcccagctgcaggaggctgaggtgggaggattgtctgagcccaggatgtcaagcctgcagtgagctgagattgcaccactgcactccagcctgagtgacagagtgagamcctgtctcaaaaataaatwaattaattaaaaataaaaacgatcaatgtggaaaaaacttgaagactgtgcaaatagccatatgttgcttaacgatgggaatacattgtgaaaaatgtgttattaggtgattctgtcattgtgcaaacaccatagggtgtacttacataaatttagatggtatagcctgctacatagctaggctatatggtttagcctattgttcttaggctacaaaactgtacagcttgttactgtactgaatattgtaggcagttgtaacactatgataagtattatataaacatrtctaaacataggaagatacagtaaaaatacagaattataatcttatgggaccactgtcataagtgtggtttattactgaccaaaatgtcattatgtggcacatggctgtatcttgcttttcatcaggctttacactctagatgagcatccattgattattcttacccacaccaatggtacagttatgatagttggaaaatgctgcttttttccaactccactactccctccatttcatggtattctaatgaatgatcattgtcacaaaattcaacacctaattgtatctgttatgataatgaaaagaaacaaatgacccattcaaaacagttcagttgaaaagagtttatcaaaggaatgacttaacacggtgtggccacagtaagggaatcaacaaggaatggtgaagcacccagtaactagcaacagtgggaagccattgccacccttagacctgcggaggcaaagggagggcacatggttatcaggctcgtgaaactggaattcatagaggaggaaccacctacaggtgctgtgtctctagagaaaaacagccactgtcagcacagaggcaaggttgagacaaagctgggggaatcagctgagttcttcctgctgctgctctgacctgttagtagtgctcacggttgcccagtcataagccaaaggacaagaaagcctgggtgatgcaatctggagagcttgacctcctggggcacagaaggtgttggggggttgtgggaatggtagtataaccagcacactagctaagattttattaatgtgacaagacaagaaaaagatctctgatgcgcaagaactgaatggagagttcagatcatgttcttagatgggaagattgaatagtataaatatcttggttcttgccacatgaatttgtctacttaattccaacagtctaatggaattacggagggagtaggggtgatggtggggtaacattgttaaaatgattctaagttcaatcaggcaagaataacaagaaaaaaaaattcgggccaggtgcggtagcacacgcctgtaatcccagcactttgggaggccaaagcaggcagatcacctgaggtctggagttcgagaccagcctgaccaacatggagaaaccctgcctctactaaaaatacaaaattagccaggcatggtagcacatgcctgtaatcccagctactcgggaggctgaggcaggagaatcgcttgaactcaggaygcggaggttgcggtgagccaaattcatgccattgcactccagcctgggcaacaagagtgaaactccatctcaaaaaaaaaaaaaaaattctgatttcactgcgtaattttaaaaataatattttaattttgttttgaactaaatattttaaaattatttgtgttcataaattatttagaattgtttttaagggttttctaagttacatttttgttactcctttctgacttaaatataatatagttaaagaatattatctaaatgatactaattctgtaaaatgttgttgaagcttaatgatctaagacgggtcagtttttgtgaatcttactgtgtgtgtgttcctgagaaggatgtgtattcactaattaatgggtgctgggttttattggtaggccagaagtcaaacttgacagttatgtagcccttaattcatgctaatgttttgtatcattggtctgtaaataactgaaagagctgtgttgaaatcttccactttgtggatagatttgttcatttctctctaaagttgtcaaattttgctttattttgaggctattttttgagagcttacaaatttagattcattagcattttctagcaaattgaacattttattrtaacatacrgactatcactaaaaatgctttttgtcttacagagtagaattgctaaataaaatacaggatgctcaattaaatttgaatttcagataaatgttgagtacttttttagtataagtatgttctacatattgcaaaaattattcatttttcacaggaacagaaaaccagataccacgtgttctcacttataagggggcactaaatgatgagaacacatggacacatggcggagaacaagacactggggtgtactggagggtggagggtggaggagggagaggatcaggaaacataactaatgggtactaggcttaatacctgggtgatgaaataatctgtacagcaaacccccatgacatgagtttacctatagaacaaaactgtacatgttcccctgaacttaaaataaaagttaacaaaaaaagtctggcatggaaagacataaacatgcgtggagctggttgtctctgatcttgcaccacttgtgataaagttgtttgtagtatttaatgaatgtgttcaaaaatctgtatctttagttatatgtacttcttggtcctaatattactgatttgtgctacctatacagttttggtggggggtttgcttatttgggggataaccttactactggtttgtctctcttattagtcttttcaagtaatactttctttggctgtattctgttgctccttttctagcttgtttaattgaacatttaattaaatattcatcattccttttgaaaaaattgttgtttatctgacattcaaatttaactaggcatcctatgttttgtttgtttttgctaaatttgggagcctatttaaaaactattttgtttgatactaatatagctatccccaatattttttggttataatttccctagtatatcgtttttataaatttcattctttgagtctttgtgttttaatgttttttttttaatatcctatagtcagaattgttagtctaatcttacctatgttgtttttctaggaagtgtagggcttttttattgggattgcagacctattgtcccttttttaaaactatattttcaaatgctttttatttttcccacttgttttgtgcttttgtggactgttttctttttgcatgattttaaaaaaattccatgttctcttactattattttagacattacacatatttattattttgttaacctttaaatattactgtcaggccaggcacggtggctcatgcctgtaatcccatcactttgggaggccaaagcgggtggatcacctgaggtcaggtgttccagaccagcctggccaacatggcgaaaccccgtctctactaaaaatataaaaattagccaggcggggtggcargcgcctataatcacagctactgagaaggctgagtcaggagaatcgcttgaacctggaggcagaggttacagcgagccgagatcatgccattgtactcgagcctcggcgacagagcaagactctttctcaaaaataaataaataaataaatatatattactgttcaaactctacttgataaagttatttaatatttttaaatccccacacaaacatcctaactctgataactacccttttaatgcttatgctattactgttgaatatttaagttctttttttaacactatatgttagacatcatcattactgttactttatatggacagtattatgtttatgtatatgtttaccatttcccatgctcacaattacttcttgcatctaagatcatctttctcagattggtttccttttttttcccccaagtacattcttcagaatttttttttttttttagacgaagtctcactctgttgtcaggctggagtgcagtggcacgatctcagctcactgcaacctccccctcctgggttcaagggattctcctgcctcagcctcccgagtagctcctactacaggtgcccgccaccacgcctggccaatttttgcatttttagtagagatggggtttcaccatgttgcccaggctggtctcgatctcctgaccatgtgactcgccgccttggcctctcaaagtgctgggagtataggcgtgagccaccacgcccagcctagaagtttttttggtaaaggtaaattgatggtagactcagactttgcatatttgggaatatttttacttcactctaattcttgaaatgttgttttgttgaatagactaggtttatagtaatcttccatcagcactttgaagatattttaacattttctgggccctagttttgcaattgagaagttactatcagcgtagttgctatttctttgtgggtgactttactctctgatttttaaggtcttctttatataactgtattttccaattttactacaatatagctaactgtggcttttctcatttatttgttttgttttgtatatttatatgatttcctgtattttatcagttctataaaattctcgaccatttttctttgaatatttcttcttctccgttctctccattttgtcctttgaactccagttatttgaatattaaaatgttgcattctgtcctccagatagtttaacaactctttcatgttttctgccttcttacctctatctgctagataatttctttagatcaattgtctgattcactcattctttcttcatctgtttcatttgctctttaacgtgtccagtatattttaattaaaaatatatatgttgggttatttttagcctgcctgctactttaaaaaaatactcttttgttccttttaaaacatcaaaagttgatctgaagtgtttcagcagttgaactcctaggtcttcattgtcagcctgctgtacttgttttcttcaagaagatagatatctctaaatgttgtcatatccttttttgttattgaatcaaagtagctgaatttgatagaagttcagtgttgcattgtccagatacacagttttgaggtttgaaagcttgaataagtgccagtggacttcatgcaaatgctttatatatttttcacctaatatattttgaatttcaacaagtaacacattctcttaaatactgacttgataggcaagtgagcatagcaagcttcatcttttagtgaaagtccattgatcctgtttcgtaattggatgaagagtgtccaaactattgccagtagctttctgttttcccatcatttttcaacccagaaatatttatttttctttccagggaggcattagcagtaccctggaagctcccctcctacccctccaaattattccctcctcctctttacttttctccaaagataatctctgtcctgaatcaaaaatcgtccccgcttcctggtagcacccgatctggaagaaacccaaaatcacctaaccaaaacctgaatcatataatagtcttttytaatactcttttactgagacattccacaattcccaattatatgtgttattccttgctgaaatgaataatgaacccaacatgtgcaactacagctatgttcctggtaacctttggctgggaggattgacaatattcatttgtgtctggtttctttctttctttttttctttttcttttttttttttttttttttgagacggagtcttgctctgtcccccaggctggagtgcagtggcacaatctcggctcactgcaagctccacctcccgggttcactccattctcctgcctcagcctcccgagttgctgggactacaggcgcccgccaccatgcctggctaattttttgtatttttagtagaggcggggtttcaccatgttagccaggatggtctcgatctcctgaccttgtgatctgcccgcctcggcctcccaaagtgctgggattacaggcgtgagccaccgcgcccagcctggtttctttctttttaacattttgtaagattcatgtttttgcatgtagtcatagttttttttgtgtgtgtgatggaatttcactcttgttgcccaggctggagtgcaatggagtgatctcgtctcaccacaacctccgcctcccaggttcaagcgattctcctgcctcagcctcccgagtagctggtattacagacatgtgccaccacgcccggctaattttgcatttttagtagagatggggcttcaccmtgttggtcaggctggtctcaaactcctgacctcaggtgatctgcccgcctcagcctcccaaagtgctgggattacagttgtgagccaccgtgcccggccttgttcatttttgttatttaatattatgctataattacataactatttggaactttttgactctgttttaatgttgatacacagtatctttgtacatatcatttggtgaacatgaataatgcatttttgttgggagtatgcctgggagttatattgggagttcccaagaccactcatagtaatcagaagttatgattatgattatagttgattacagcaaaaggatatgaagtaaaagtcaagaaagggaaaaggcacatgggcaaagtctggaaggaaccagctgctcactttccaatgtgccctctcagtggagtcagacaggacatgtttcatttccccagcaacatgtgtgacaacacacacaaaatgtttccaatcaaggaagctcacctgagcttttgtgtccagagtttttattaggggtcagtcatgacataggcatttggtattacctgcacaactgacttcagggtcaggctccagatccccagagaaaaagcaggtgtcaaccataaatcacattgttagcataaactatctggttaaaccagtacagcatggcccaaggcctcagacacatgaaacatttcttatcagacataagattctatgataggaggcagccaatagccagtcctgaaaacaggcctgtcttgggaatgtgcaaccaggcctgctgagttaataaacttttccagcagagattgaaaaggatgggtcaaaggatatctgtaggtacaaatttgagagatagtgccaaagagtttttcaaagtgattatacctgtttactctctaaccagcagatgtgtaagaacttcagttcttctactttgccaataccttgtacagtttaatcttctaaaattgtaattttcttcctcgtgtctattgatatctcattttggtttacatttttatttccttagtaactgagactgagcaccttttcatatgtcattgaccagtagcctatgttgtgaagtgccagttcaggttctttgcctggttttcttttgaatcatttgcttttttctcattgatttttaggaattatttacatgttttgatatgtacacttcatgtgtgtttcaaataacttctcccatctatctgccttgccttttctctctcttaaggctgtcttttgaaaaatagaagttaattttaatgtctaattttgtgatctttttctttactgcttttggcataccatttaataaatcttttttccaattcaagtccttggatatatcctcctatgttatctaatgaaaagtttattgctttacctttctcttttagatctgtaacctgcctggaattgatttcttttcattgtggtaagaaacacatgacataaaatactctcttaaagatttacaactgtacatctcagtagtgttaaacatatttacagtgttgtaaaacagattcagaaactttttatcttgaaaaacggaaaactttatactcattaaacaataactctccattcttcttctccccactcccctccttgctgctcctggcagtccctattttacttttgtctcgatttaagtacctcatgtggcatcaaatagtatttgtctctttgtgactggcttgtttgagttagcataatgtcctcaagtttcatccatgttacaggatgtgacaggacttcctttttaaggctgcatagtatttcattgtatgtctgtaccacattttgttcatccattcatctgttgatcaatttgggttgcttccatttcttggctattgtgaatagtgctgcagtgaacatgatgtgcagatatctctttgagttcttgctttcagttattttgtgtatactcagaagtggaattgctgaattatatgggagttctattttttattttttcaggaagctgccgtactgttactccatagcagctgcactattttacatcccttccagtagtgcacaaaggttccagttttccacagctcaccaacacttgttattttttttatttttttattttttatttttttaaatagtagccattctaatggatatgaatggtaactcattatggttttgatttgcatttctctgatgattagtgatgttgagcatcttttcatatgcttgttgtctatttatgtatcatctttgggaagaaatactttgttcatttttaattggattttttgattttttgctgtgaattgtagaagttctttatgtaattctgaatattaaccccatagcagatacatgacttgcaaaattgtgtttctttagagttgatttctttaactttattttgattctttaattgggccatctatccagaccaggctggtctcggactcctgagctcaggcaatcaacccgtatcagccttccaaagtgctgggattacaggcgtgagccaccctgcctggccgctgtggatttttaaataaacgtcctttatcatgwdraagaagctttcttctgttcttagtttactaagtgttttgttatgaagtgatgttgagttttgcccagtgtttttttctgtgtgtattgagatgatgtgtttttctttatattttattattatgtattacactggatgattatcttacattgaaccaccctagcattcctgagataaatccaaattgggctgcatcgaaactaaaaacttttgtattacaaatgttatgaagaaagtgaaaagacaacccacagatgctatctagagattggtatccagattatataaagaattcttgcaagtcaaataataaaaatttacatcacccaattagtagtttaagtcagccagagttggttcctcttgaatcacccaatttgtggtgaattgaaactataatcagatactacttcacacccaccgggatgcttataataaaaaatacatgggaaatagtacagtagttcctcaaaaaattatagaattaccatttgatccagcagttccacttctgtgtatatatacaaaagaggtcaaagcagggatacagatatttgtgcaccagtgttcatagcagcactattcacaacagtcagaaggtggaaacaacctaaatgtccatctacagatgaatgggtaaacaaaatgtggtaaagatggatcaatagatcacaaaggaatattattcagccttaaaaaggaatgaaattctgatacatgctacaataaggatgaaacttcaagacactgtgctgggtgaaataagccagacacaaaaggacaaatgttgtataatttgacttatggggtacatagaataggtcaattcatagagatagaaagtagaatggaggttatcaggggtggggtatgatttcattcctgtaaagttcagagttactcttattggaggaaaggatacattatgactagaaggagggacaaggaaggccactgggtcatcttctatttctcaatctgtgtttactccatagaatttgattgagctgtttagctgtggtttgcacattttcctttacgtataaactttttacatatatacttttattaaaatctacttaaaatgggaaaaaaaaagatatctagatttcagcttttaaatgctggtgcaatgatagccattttcggctgggtgcagtggctcacacctgtaatcccagcactttgggaggctgaggcagctggatcacctgaggtcaggagttcaagaccagcctggctaacatggtgaaactttgtctctactaaaaattagccaaacctggtggtgggttcctgtaatcccagctactcgggaggctgaggaaggagaattgcttgaactcgggaggcagaggttttgcagtgatccaagactgtgccactgcactccagcctgggtgacagagtaagactctgtctcaaaaaaaaaaaamaaaaaaaaaacaagacaaaacactcatatctgaaatgtggtttacatagaatgttcttccaggcaaaaaaaacaagattaaaattactggttttgaaaatgtattctgttctttcttatatcaaagtcttgatgttggtggctagagagaacttcttaggttttctacctgtattagtccgttttcatactgctataaagaactgcccaagacggggtartttataaaggaaagaggtttaattgactcatagttcagcatggctggggaggcctcaggaaacttaaaatcatagtagaaggtcaagaggaagcaaggcactttcttcacaagtcacaaaggagaagtgctaagtgaaggatgaagagccccatataaaaccatcacatctcgtgagaactcactcactatcacgaggacagcatgggggaacctctgccgtgattcagtgacttccacctggtctctcccttgacacgtggggattatggggattataattcaagaggagatttggatggggacacaaagcctaaccatatcactaccatttttcttttctttttttttcatgcctggattttttcgttgttccctcatgaacattttaaagtgtaattaagcaaaagagaatactatacaatggtttttaacaatttttttaagtttcccccctccccccaagacagggtttcccaatgttgcctaggctggtctcgaactcctggcctcaagtgattctcccacctcaccctcytaagtagctgggactacagacatgtgccactgtgcccagctgcctatacagtgtttttattttattttatttttttaagatggagtcttgctttrtcacccaggctggagtgcagtggcattatcttggcttaccgcaacctstgcctcccggattcaaatgattctcctgcctaagcctcccaagtagctgggattacaggcacccgcctccatgcctggctaatttttgtatttttagtagagacagggtttcaccatgttggccaggctggtctcgaactcctgagctcgtgatctgcccgccttggcctcccaaattgctggggttacaggcgtgagccaccatgcctggcctttaatttttttaaaaagtaaaacttctttaattttcttctcgcaagaattgaatagaatgatagaatgaatgccagtattttataatgttgtatccagcaggttgcaatcagggaggctccaacagagtcactttttctgtctttttatgttcaatctatgctgtaaattggtttcagaaacttctgtgagtctatcaactgtaaaaatggagatgactatgaaaggatcttacgcttttattcttctttgatccacatgtctgtttgttcctccatctagaatataaagatgattaagactctacctgtctcctttaagtccagtgaagaagatagatttacaattaatggtaattcagtataactgccgtaagaacagggcattcagaatgccctgtgagctcagagatggcgctactgtattctcatgtttaaaggataagtaaaagttccccagtttgagaaaagaggggaaaaggactccagtgaaaggaaattgatgaaattactgttgactttacttgtatatattaactgtctttcagtgtctctgaaaacttgatttgggactatttcctttgaacagaaataatagcattcctgcctgataaatgtcctgtggtcaaataawatgatttcctaatcattctgcacactaaacttccccccaccaggaaatcaatgccttaatgctaaatttcctctgtactactttctgtaagagtaagaggttcctatttcacagtcacgacacattcccaactcaattcacattccaatccatcttgtccaacttcattgaaagttgatacactgaaccatttcctttacttaaaagaaatagaattcttcctaaattctatctactgttggaatagaaagaatatcatgcttctagactgactaattttttttcttcttgatataagtattgacaacatttattcatttgtttctaggcagcacaagactgttgaactttcctagaactgagtctgagatttgcaaagctgccaaaatattttgaaacaaatgaaaatatgtaaacatgaatgttatcagctgttttacagtatttgtgttttagagataatgagcatctggtggaccacaggagcccagggggatttcaaactccagattcctttttgtgtaatcatatctggctggagttatttgttttctctgcatgtgaaactatcaagtcataattcttcaaaggggaatgtttattgcattatttaaaaataataaattatattactaaataaataacagcaggccaggcataaaccaatgatgaaagtttgtcagaaactaaggcttctgattaattctgtgctctggactataattggaaggaaggattatattagagtttacaatgagtttacagaaagaaaggagagggataaattatatttagttcacagtaaatctgaattcagaacccctggttgtaagactagtcttttaacctttagagttaaaaaatgtatatgtacagctgggtgcagtggttcacgcctgtaatcctagcactttgggaggccaaggtgggtggatcgcttgaacccaggagtttgagaccaggatgggcaaaatggcaaaaccctgactctataaaaaatacaaaaattagctaggtgtggtggcaggtgcccatagtcctagctactcaggaggctgaggtgggaggatcccttgagtctgggaggtcaaagctgcagtgagccgtgattgtgctactgtactccagcctgggtgacagagaaagaccctgtcttaaaaaaaaaaaaaagtgcgtgtgtgtgtgtgtgtatgtacgttgaagaaaactatgagaaaaagcaaaaatgtagagtccataatgcataatgttgtgttaagcacatagtttagtcattggtacatatttctggagatggtctaaagatctattttttaaaaactgattttagttaaatcagaggttagcaaatcacagcctgcmggccaaatctggcctatcatacattttgtttgtctctttgttgtgtttttggtgtttttttttctttcttttttttttcctttccttttttttttttttttttttttttttttgagacagagtcttgctctgttacccagaccaggctggagtgcattggtgcgatctcagctcactgcaacctctgtctcccaggttcaagcaattctcctgcctcagcctcctgagtagctgggattataggtgtgcaccaccatgcccagctaatttttgtatttttagtagagatggggttttaccatgttgcccaggctggtctcaaactcctgagctcaggcaatcttctcgccccagcctcccaaagtgctgggattacagacgtgagccaccgcgcctggccctatcatacattttggtaaataaagttttattagaacatactatgctcaatcatttatatgttttgtgtggctgcatttgccctgcagcagtagagctgagtagttggaacagagactgtggttcatacaacctaaaatatttaccctggcctttgttacagaataggttgctaacctctgagtttctcagttttagcccattcacaaatgaaatagtttttttttgttgttttttttgagacagcctcactctgtcgcccaggctggagtgcagtggcatgatcttggctcactgcaacctctgcctcttgggttcaagcaattctcttgcctaaacctcctgagaagttgggactataggcacatgccacaacgcctggctaatttttgtatttttagtagagaccaggtttcgccatgttgaccaggctggtcttgaactcctgrcatcaagtgatctgcctgtcttggcctcccaaagtgctgggatcccagcctctctctctctctttctcactctctctctctcccgctctctctctctctctctctctmyctctatatatatatatatatatwtatttttttttttttttttttttttgagacagggtctcattctgtcacccaggctggagtgcagtggcataatcacagctcactgcagcctcaaccccacgggctcaagcaattctcctgcctcagcctcccaagtagctgggattacaggtgcgcacaaccacgcccagctaatacttgtatttttttgtagagacgaggcttctccatgttgtccaggctgttctcgagctcctggaactcaagcaatctgcctcaggcaggaatcctgaaattctgggattataggtgtgagccacttctcctggcccacaaatgacatattccttataatctactacagtgagctttgcatggttaatatatttgttgtgttgaaactatcttcctgattttttccaattttttatagagaaacctggaaagaatagtaccataaatacctatataccctaacagagaattattgttaaaattttgccatatttgctttatcttctctgtgcatatgtatactcacatggctttttttttattggtattagttgaaagttgcagatattatgcttcctcagcgcatatccctaagaataaaagcattttcctcgacaactgattatgttaaaatttgaagacgtgtatgaggtttttgtttgtgagggctatatgactggcgtttctccagtatatgacactttgttcatccctatgttcctctttataaactgcagaaattctaaatataatgcattagttgtctattgcttgcaagtagtagactgaatgatggctccataaagatgtccacttccattagataaagaaaatgtgtacatatacaccatgaaatattgcacagccataacaaagagcgaaatcatgttctttgcagcagtttggatggmgcttgaggccattatcctaagtgaattaatgcagaaacagaaaaccaagtacctcatgttctcacttgtaagtgagaggtaaacactgggtacaaatggacataaagatggggacagtagacactgggaatacaagagggcagaagagggaaggaaaaataagggttgaaaaactacctattgggtactgtgctcactacctgggtgacaggttcaatcatatcccaaacttcagcatcacacactatacccctgtaacaaacctgcacatgtaccccctgaatctaaataaaagttggaaaaacaaatcaacccagatggccatttcctaatccctggggtctgtgaatatgttaccttatctggcaaaaggaactttacagatggaattaaggaattttagatgaggagattaccgatcatctggtgggcctaaagtaatcaccagggtcctcataaaggagaggcaagggagttgaaggtagagaaggggctctgaagatgggaagcagaataagtgtaggaaatgtgagcttgccacactgctagtgttgaagatggtgaggctaagaattttcacatccactttcaaaaccattgtgtcctggctccttttaaaccatctttccctcaatttctctgtcctcttacatcttattgtaaacaccaagaagaaacctggcagttaactttgcttggaaatctttttagctagaccatctaattcattcggcacattttctaccttccacatcactgtaaaattgggttgctaaactttccacaactacctaacagagatcccttgcctccagtttctactcagatgttcctcacattccttaaaactcacagtccacctcctaacaatctaaaatctaccaactatcaattcctggcaatttaggctttacygctcctctcctgaaaggccttaaagtattagaactgggccctattattagaacctatttcccagttctaatattcctcccacatttttggtatgtgtgacaatggaactttactcctgataccaaaatctgtatgatttatatatgaagcataacaaattattctaaaacgtattaatggcttaaatcaacaaacgtgttgtctcataggttctgtggttcaggaatccaggcaaagctacctagatgcttctagctcaggatctttcatgaagttgcagtcaagctgtcagctgggctgcagtcatccaaggctcagctgggagaggatctgccttcaagctctctcatgtgactgttggcrggcctcaggttttcactggctgttggctggagatgccagttatttgccacatgagcctctgtctacggcagttgacaacatgcagctggcctacctcagagcaagcaaccaagcaagagagcaagatagagtgctcaagacaaaagataacagactttttgtaacttaatctcagaagtaacatcccatcacttttgccaaatyctggttgttagaagccagtcactagatctgtcccacacttgaagagggttaaacaaggtcatgttcttcataagattaatccaagtacagaattggcttaataacatttctgacgatttttcctataacttgtaaaaccttggctatctgaaacccttgggaagtgaatcatccttaaaagctaagtttctggatagatttttaccatgaagggaccaaatcttaataatttggagtagaatcacttctgcatttgatcacatatttcttgccttttaaaataaattactgatcattatttgaaattttatttcatcaaaagaaaattagcaattgtgtgttataaaaagaaggtgtctgtcttctccttatgtagggtatagaactgttcatctctttactaaaaacttaaggcttctgtctgccttttataatttctgtttctttctttgtttcatttgttacctcttagttatcagtacttgcccattgccttcctgtttactgtatctagtaagttgctgcaaaagtaattgtgatttttgtattaaaacaaatggcattagattctcataggagcacgaacacttttgtgaactgtgcatgtgaggcatctcggttgttcttgccttatgagactctaatgcctgatgatctttcactgtctccgatcacccccagatgagaccctctagttgcaggaaaacaagctcagggcttctactgattctgcaatatagtgagttgtgtaataatttcactatatattatgatgtaataataacagaaataaagtgcacagtaaacgtaatgtgcttgaatcatccggaaaccatcccctctgctggtccatggaaagattgtttttcacaaaaccggcccaaagttggggactactgctatagagaattggatctgcggtctacaagtaatgttaatgacatttattttaagttgcactgagacttttgtttacatcttttttttttttttgagatgagagtctcgtttgtgttgctcaggctggagtgcaaggcacaatctcagctcactgcaacgtccgtctcctgagttcaagcgattctcctgcctcagcctcccgagtagctgggattacaggtgcccgccaycaagcccagctaattttttgtatttttaatagagatggggtttcaccatactggttggccaggctggtcttgaactcctgacctcaggtgatccacccgcctcggcctcccaaagtgctaggattacaggcatgagccaacatgcctggcctgtttacatcttaattatgaattgttactatagtcagccctttgtatctgtggtttccacatccatagattcaactaaccatggactgaaaatatgtgggggggaaatgatgcttacatctgtactgaacgtgacggactttgtcattatttcctaaaaaatacaggataactatttacatagcatttgcattgtattaggtgttataagcagtctagagatgatttaaagtatacaggaggatatgtgtatgttacgtgcaaatactacaccattttatataaggcacttgagcacctgtggattttgttattcacaggggatcctggaaacaatcccctgtggataccaagagatgactgtataggggaggccgtggtgacagatgaagtggcactgggcttagtaagggtaagaaagctaagagtggcctgaggacagatgacaaacatgacatattgctcactttagccaatgctcagaatctcttaggtttttgaaacttcacaagcaatttaggcaaactctcctttcttctctatctctgtattctatgtaatcccacagttgaaggctgttcttatagtggaattaattatacctcactccaaaaacttgaccctgatttccgtctacaaacccaaagcagcaaatacaatttacttttatatttgaattattttctttgtaatggtgtctgttgacagccaaagcctcttgtatggaaacataccaccactgccacaagtaaaagctataaagcagtgttaaatactgtatatagagctcacatttgtatatgcatttcttttaggtcttatgtagtgtgtgtactgtggaagatcgagaaagtgcgttaggttgttagacaaaagacccagaaggcctgctagagatgccacaggtggaactaagaaagcaatctctgtgtcactcaggctttgagaaacttccttcagaatcataaaacattagaactgggaagrttaaaaaatctttagtctttttttcccagctccagtctcttgtgaataattaacagtaaagttaaagattatgggaattacgtgcctccttttttcccttgcacaacatagaatttgttttctaatagtagtttatttgttagctttgcattcccataagtgatggtttccagccttggcaaacccttgcagcctccagccacaagtcccctggacctcagagaatgtatatactgtatgtgcaccctaataacatrtttccttaaaactagtactactggatcctctaactttagtacatgtctttcatgtccaacttttcagaggccgccaaactagcaaccctaaactcatttgtcactatcaaaacataatatacgaatatggaaagctaatataaaaatggtaagggactgagccatttggaaggtaacttaatgtaagtgcctgaaaaacagggatacaaaaaagcaaagggacaagaagcaagccagttcaccctgaaccctacaaatgtttgggaattagaaacatcaagtattacaaattaggggaaacggatgaagtctgatactaaaaatagggaggttgacagtctgtgtaggaacagttagacttccagatccttatctctataccccacctccccctctgcagaagagatagattcccttagggaggaagaaaactagagaaaataaagacactagggggagagtgtgatgtcagcaagatagtggaataaaagatacctggcatcactcttcccacaaaaatgcaactagaaattattcaggctgggcgcggtggctcactcctgtaatcccagcatgttgggaggccgaaacgtgtggatcacttgaggtcaggagttcgagaccagcctggccaacatggtgaaacgccgtctctactaaaaatacaaacattagctgggcatggtggtgggtgcctgtaatcccagctactcaggaggctgagacaggagaattgcttgaactcgggagttggaggttgcagtgagccaagatcatgccactgcactccagcctgggtgaaagagcgagactccatctcaaaaaaaaaaaaaaaagtattcaaagacaagaatatcaacctgagttcaccagaacttggggaagaagtggagaaacctcctgggccaacaaaattttttgtaaaataagtggtcatttcagactgtgccaccccttccccccaagctggcataacaccactcagggagaattttcctagccctgcagtttccaaggtgagaggaaggaattggaggtgtgtattcagtctcctcactggtctgggaatcttcccagggagcccactcccgtcccatcaggragagccaggagagctgaactatctggggtaaagtggggacaaagagcagggcactgattgtagcaactagtatatggatcttgcagctactctgtactctaattagccgagacaccctattgacaaggatggccagtgtcttagtgccactggggtgtaatcagtgggaaggcctgaatccctggtcggattttccacaaaacttagtgctcacatggaaccttcccgtggcccagaaacagctataagattgggattaagctgggcatggcagctcatttctgtaatcccaytttgggaggccaagttgggtggataatttgagcccaggagttcaagaccagcctgggcaacatagcaaaatcccacttctaccacaaaaacaaaagttagctgcatgtggtggtacgtgcctgtaatcccagctacttcagaggctgaagcaaagagtcgcttgagcctgggagacagaggttacagtgagccaagatcgcaccactgaacgccagcctgggcaacagagcaaaactgtgtctcaaaaaaaaaaaaaagttgggattaacttccagtgtacacttaagcacttaagactttcacagactgggaaatgatgacaggatagcaatatagttggagaacaatgtttacctttcggtggtcactataagtcttcctgtctgtgaaacaatgtcagggcaagttagtttagttttagtgcagtgttttgaacggcagggcaagttagttctgttttagtgcaatgttttgaatggcagggcaagttagtttagttttagtgcagtgtttcagttctgatgctcactgtaagtcttccccagaatgggaagaaacaataggccagtacttaagctctcatactaagtaaaggcccgaaatcaccaaagaacacctgcaaaacctagaagaaatggctgtgtcctcaaatgtgcaagcatcaacataaacaagcaatgattatgaaaacttagggaaatatgacaccaccaaaagaaaccaacaaagctccaccagtggactcagaagaattgaagatctatgaaatgtcagacagagaattcagaataagcctctttaaaaagttcagtgaatctgccaggcatggtggcttacgcctgtaatcccagcactttgggaggccgaggtgggcagatcacgaggtcaggggatcgagaccatcctggctaacayggtgaaaccccatttctactaaaaatacaaaaaataagcagggcctggtggtgggcacctgtagtcccagctactcgggaggctgaggcaggagaatggtgtgaacccaggaggcggagcttgcagtgagctgagattgtgccactgcactccagcctgggagacagagcaagactccgcctcaaaaaaaaaaaaaatgttcagggaatcacaagaaaatagagatagaaaattaaatgaaatttaraaagcaatccatgtatgtagtgagaaatttgacaaagaaatagaaacaagaaaacaaatagaaatcctatctataaacaatacagtaactgaactggaataactcattggaaagctttagcagcagacttaatcaaataaaagaattggtgagcttcaggacagaacatatgaaattacccattcagaggagcaagaataaaaaagggtaaagaagacctacaagaattgtggaataccatcaagcagactaacctctgcataataggaattcctgaagatgaggaagaaaagggtgtagaaagcatacttaagcaaatcatggctgaaaaagtcccaaatctagagaaagatgacactgtctaggtacaggaagctcagtgatcagcaattaaaatcaacccaaagaagagatacctatggcacataacaatctggttaacaaaaatcaaagacaaagaaagattactcaaggcagcaagagaaaagaaatgtgtcccattcaacataccccaatagagctttcagcagatatcccagcagaaaccctgtaggccagcaaagagtggaatggtatatttagagtgctgaaggaaaagaaaaaaactgccaagcaagaatactgtacccagcaaagttaccctttataaacacaaaggcaagataaagatttttccagacaaacaaaagttgagggaattcatcaacaccagacctgtcttacaaaaaatgctaaagggagctgttcagtcagaaagtgaaggatgctaatgggtaaaaagaaagcatctaatggcattaaactcaccggcaaaagaaagaaaactcactggtaaaagaagacttctgaaaaattcagaatattgtaatactgcaaatgggatgagtaaaccacttatattttaagtatgaagactaaaagacaaattttttttttttttttttttttttttaagacagagcctcgctctgtcactcaagctggagagtgcagtggtgcaatctcagctcactgcaacctgcacctcctgggttgaagtgattctcatgcctcagcctccgagtaactgggattacagatatgtgccaacacacctggcttatttttgtatttttagtagagacagtatttcacaatgttggccaggctggtctcgaactcctgacctcaggtgatccgcccayctcggcctcctgaagtgctgggattacaggcttgagccaccatgtccggccgacaaaactattaaaaacagtaactacaacggttatttaggagacagacaattgtttaagcaataaaaagattaaatcaaaacatcaaaaagtcaaaatggcaatggcggtgttaaagtatagagtttttgttacttttctttgcaaagttaagtgattatcagtttaaaataacctattataagatttttttgtaagcctcacagtaaccataaagcaaaaacctataatagatacactaaaaataaatagcacaaaatcaaagcacgctgctagagaaaatcacttaccatagaggaagacagtaagagaggaaaataggaagaaagaatctacaaagcaaccaaaaacaaggaacagtatggcagtagtaaacccttacctgtcagtaataactttgaatataaatggattaaattcttcaattaagagtggcagaatggattaaaaaacaagacccatccatatgctggctacaagaaactcacttcatctgtaaagataagcacagactgaaagtgaaggtatggaaaaagataatttatgcaaatggaaaccaaaaaagagcaagagagcctatagttttatcacataaaataaacttaaatcaagatggttaaaaaaaagacaaggccattatataacgacaaaggggtcagtacagcaagaggatataacaatggtaaatatatatacacccaacaccagagcacccaaatatataaagcaaatattaatagacctaaagagagagatagactgcaatacagtaatactagggaacatccacactttcaatgtgaacagatcatccagacagaaaagaaacaaagaaacgtagacattaaactgtactctggaccaaatggacctaacagatatttacagaacattccatccaacagttgcagaatacacatttttctcaacagcacatggaatattctccaggattgatcatacattaggtcacaaaacaagttttaacaaatttttaaaattgaaattatatttatcttgtcacagtggaataaaactagaaatctataatcagaggaacattggaaacagtacaaattaatggaaattaaacaacaaatggaccaatgaagaaattttaaagtaaattttaaaatttcttgagacaaatgaaaatggaaacaaaataccaaaacctatgggatacagcaaaagcggttctaagagggaagtgtatagcaataaacgtctatatcaaaaaagtaaaaagacttcaaataacctaacgatacacctcaaggaactagaaaagcaaaaccaaacaaacccccaattttttgttctttttttctccgtgaaaaaaggcatctaaaaaacaaaccaatgttaatagaaagaaataataaaagagcagaagtaaatgaaaccaagactaaaagaatacaaagatcaatgaaatgaaaatgtttttttgaataggtaatcaaaattggcaaacctttcagaagactaagtgttggggggtggtgggtggggggagagaagacccaaataagcaaaaccagaggtgaaaaatgggacattgtaagtgataccaccgatatacaaaaagatcattagagactactatgaacaactatacaccaaaaaattgcaaagcctagaaggaatgtgtaaattctctgacacatacaacctaccaagattgaatcaggaagaaacaaaagacctcaacaaaccaataatgagtaatgagattgaagccatataaaaaaagtctctcaaccaagaaaagcccaggacctgttgcttcactgctaaattctgccagacatttaaagarctaataccaatcctactcaaactcctcaaaacaaaaatttttttggaagagaagggattacttcccaactcattctacaagggcaacattaccctgataccaaaaccagacaggatgcaacaagaaaatgacaggccaacatccctgatgaacacagatgcaaaaatcctcaacaaaatactaacaaaycaagtgcaacaatacattaaaaagatcatcctgggatacgaagaggggaagaacagacttacttgagggtggggggttggaggaaggagaggatcagaaaaaatacctattcggtactatgcttattacctgagtgatgaaataatctgtacaccaagcctctgtgacacacagtttacccacataacaaaccagcacatgtacccctcaacctaaaaaaaaaaaaaaaaaaaaatcatcatgataaagtggaaatccgagggatgcaaggatgattcagcatacccaaatcaataaacatagtacattacattaatacaatcaagaccaaaaaccatatgatgatttcaatagatgctcaaaaagcattcagtagaattcagcatcccttcttgataaaaattctcaacaaacggtatagaaggaacatacttcggtgaggtgtagtggctcatgcctgtaatcccagcaatttgggaggctgaggtgagtggatcccttgaagtcaggagtttgagaccagcctggcccacatggtgaaaccccatctctactaaaaatacaaagcctgggtgatagagcgagactttatctcaaaaaagaaaaaaaaaagaaggaacatatctcaaaccatatatgacaaacccacagctaaygtcatgttcaacagtgaaaagctgaataatgaataatttttctctaagattaggaacagacaaggatgcccactctaaccacttctgttcaacttagtacttgaagtcctagcccaagcaattaggcaagagaaagaaataaagggtacccaaattggaaaggaagaaaccacattatctttatttgcagataacatgatcctgtatttagaaaaacctgaagactcctccaaaaactgctagaactgataaacaaattcacttaagtttcatgatacaaaatcaacataacaaaaatctgtagcatttctatacatcaacagcaagcaatctgaaaaagaaatcagaaaagcaatcccatttacatagctacaaaaaaaataaaatacctaggcatgaacttaaccaaataagtgaagaatctctgtgatgaaaactgtaaaagactgatgacagaaattgaagaggacatatagaaaatgaaaagatacttcatactcatggattagaagaattaatattgttatggagttcgagaccagcctggccaacatagtgaaaccccatctctactaaaaatagaaaaattagccaggcctggttgtgggtgcctataatcccagctactcaggaggctgaggcaggagaatcacttgaacctgggaggcagagggtgcaccaagccgagatcatgccactgcactccagcctgggtgacagagtgagactccgtctcaaaagtcagtattacccaaagtaatctacagagtcagtataatctctatcaaaataccaatgacatttttcacagaaatagaaaaaacctaaaatttgtgtggaatgacaaaagaccttgaatacctaaagctatcctgagcagaaagaacaaagttggagacatctcactgcctgactttgaataccacaaagctatggtaaccaaaacaccatggttctatatatatgtgcacacattttatacacacataggtatataaaacacctacaaatttttgttttttgagacagagtctcgctctgttgcccaggctggagtgcagtggcatgatcttggctcactgcaacctccgcctcctgggttcaagcaattctctgcctcagcctcccaagtagctgggattgcaggcacccatcacaaatgcctggctaatgtttttgtatttttggtagagatgggktatcaccatcttggtcaggctggtcttgaactcctgacctcatgatccacctgcctcggcctcccaaagtgctgggattccaggtgtgagccaccgcactcagcctagacctacaaaattatacttggagaatcctgacaaaaaggctggctgagaaagcacacccataattatactcaactctcatatagagaactctatttaactttgtagtgcttcatagccaagacttgccagaaattggcagaacatctctaacataagagagaccaaaagaaagaaaaatgtacctcggagataacaaaaacaatgtaataagcaaaagaaatcataaatgaactgtaattaatattcttgtagaggtgaggtgaaggaacaagaataaattgctattttctaaaacattcagaaagcttgggaactaaaaataggagagctgaaatttaaaatcagtgattggataaagttgagaaaatatcttagtaaaacaaaaagaaaaaacaagagatgacttagagagaaaagataagaaacttagaagcaaaattcaagttgtctgatgtttaactgactggaattccagaaaaagagaatagagaaaacgaacagcaggatgttatcaaaatgacaatataagagtagatggacatgtatctgtttccaataccactgagtgaggaaaataagccacagtaccatgaaactgtagaacaccaaggacaaagagaagctgcaaaaactgaaaaatcaactcttcaatcagaaaattgaggcttcagggcaaaccattctcccaaaaactggagggaatggtgcatactgagaatcacagattacctccagaaacctcaccagattctcagggtaaagagaaaaatctcctcaagctttaggtagggagaaggggaaatcatcatcttgaaataagccgtagcactccttagcaatggtttgctctcaaagtaaactgtttaatcaagcctaattgacatgtgctttaccagagcctaacagacctggaggaagatgtgttagtccatcttgcattgctaaaaaagaatacctgagactggtaatttataaagaagaggggtttatttggctcacatttctgcagactgtacaagaagcatggcaccagcatctatctgcttagcttctggtgaggcctcaggaagctttcccttatggtggaacacaaaggggaacaggcacagcacatggagagagagagagcaagagagagaggggagggaggtgccagactcttgaacaaccagatctcgcaccaggtcttgcgtgaactatagttatagagtaagaactcactcacaagtgcagggacaacatcaagccattcatgagggatctggccccatgacccaaacacttcccactaggccccaccttcaacactgggaatcacatttcagcatgagttggaggggaaaaatacccaaagtgtatcagaagggaaacacccaactgcagccctctctagccttcctgtcttacctaattggggagaagggaacctgagaagcacttgtgaaagtcacggcccaggcacacaggctcactaaaagactgagaactaattatgtgattataagacactccccccaccacacacacctyaccaccacaccaatcagtctcctgtgtaatgatagtggattactgctaaatgaactaattttcagaccctattctattttaataaggagtctttagggaaacgaagaaatgatagatacaaaaacaaggatgtgattgtaacaacgtgggtacagctggaggccattatcctaagtgaattaatgctgaaacaaaaaaccaaaaactacatgttccgaactcataagtgggagctagacattgggtattcatggacataaagatgggaacagtagacactgggtactgcaagagacaggagagagggaggggagaaagggttgaaaagctgcctattgggtactatgctcacgacctgggtagcaggatcagttgtaccccagacgtcagcatcacacaaaatacccttgtaacctgcacgtgtacccctgaatctaaaataaaaattgatttaaaaaaggacactaaaggaaatgtaacctatacagctacacaaaacagtaaacacarcccaactcttagccagagaaacataaagcctcaaacaagaggactttttaccgcagtttcttctacccagtatatcatgtctgctttcaacaaaaacttacaagacatgctaaaaggcaaaaatcaaagttgcatgaggcataacaagaatcagaaccattgccagactcatttatggcagcgatttttggaataatcagactggaaattttaaataagtatgattaatatactaaaggctctaatggaaaaagtgaacaacatgcaagaaaggtgggtaacataagcagacaatagaaactctaagaaagaacccaaaagaaatactagaaataagcaatactataacagaaatgaagaatgcccttggacttattgatagagtggaaaggacaatagataacctgggaaagattcaatgagcttgaagatatgtcagtagaaagttccaaaacttaaactgcaaagagaaaaaagaataaatgacagaacatggcrgggcctggtggctcacactgtatctccacacttcaggaggcccaggtgggaagatcacttgagaccaagagttgagggccagcctaggcaacagagagagatctgttgactccacaaaaaataaaaaggaaaagaataggatatccaaaaactgtgggacagttacaaaattatatatatttaagtccttgctttggctgaacctaacactaaaattggaacaataccaagaagattgcacaacatggccctgtgcaaggatgatatgtaaggtcatgaagcatagaaaaaacatttctaattgttttttttagatggagtctcactctttcacctgagctgtagtgcagtggcatgatcttggctcactgcaacctctgctgcccagattcaagcgattctcctgcctcagcctccagagtagctgggattacaggtgtctaccactgcgcctggctaatttttgtaattttagtggagatggggtttcaccatcttggccaagctggtcttgaactcctgacctcgtgatccacctgccttggcctcccaaagtgctgggattacaggtgtgaggcacctcacccagccaacatttctaatttttttttttttttttttttagacatagtctcactctgtcgcccaggctggagtacagtggggcaatctcggctcactgcaagctccgcctcctgggttcatgccattcttctgcctcagcctccctagtagctgggactacaggtgcctgccaacacatccagctaattttttatactttttagtagagacggggtttcaccatgttagccgggatggtctcgatctcctgaccttgtgatccgcccgcctcggcctcccaaagtgctgggattacaggcgtgagccaccgcgcctggccaattttttaaaaaattaaaaaaaatatgtgtatgtaaaattgtgtacacacgatgggaataacagaggaaaagagagaaaggaatagaagaaccatttgaagtaataatgactattttcaaaactaaagacagatgccaaaccacaaatccagtttagaaagttaagaaaacaagcaagatmaataccaaatgccaggtgcggtggctcacacctgtaatcccagcattttgggaggccgaggtgggcagatcacttgaggtcaggagttcaagaccagcctggccaacatggtgaaaccctgtctctactaaaaatagaaaaattaggcctggtggcaggtgcctgtaatcccagctactcaagagactgaggcaggagaattgcttgaacctgggaggcagaggttgcagtgagctgggcaccactgcactccagcttgggcaaaagagtgagactccatctccaaaaaaaaaaaaaaaaaaaaaaaaagataaatacaagaaagtctgtacccaggcacctaggcatatcataatcaaattgcagaaaatcaaagataacatcctgaaaaaacctagaggaaaaaaaacacctatggagagtggagtgaaatatctctatatttattatgtctttattatgtttttaattatgtttttcatttatttttgtggttacctggtaggtgtatatatttatggggtacatgagatattttgatgcgggtatacaatatgtaataatcacatcaggatgaatgaggtatctgtcacctcaagcatttatcattttcttgtattacaaaccatctagttatactctagttgtttttaaataaatagttaattattgactgtagtcgccgtgttgtgctatcaaatactagattttattccttctatctaataatatttttgtaccctataattatcccctcccccacccacctacccactacccttcccagcctttggtaaccattgttctactctctatttccatgagttcaactgtcttaatttttagctcccacaaataagtgagaacatgtaaagtttgtctttctatacctggcttattttacttaacataatgacccccacttccatccatgttgttgcagatgacagggtcattcttttctatggctgaatagtacatatatatatatatawaatatttcctttatccatttatctgttgatggacacttagattgatcccaaatcttggctattgtgaatagtgctgcagcaaacgtgagaatgcagatatctccttgatttactgatttcccttcttttgggtatattcctagtagtgggattgctagatcatatggtagttccatttttagttttttgaggaacctccatactgttctccatggtggttgtactaatttatattcccaccaacagtgtaccagggttcccttttctccacatcctcaccagcattcgttattgcctgtcttttggataaaagccattttaactgggatgagatgatatctcattgtagttttgatttgcatctccctgatggtcatgacgtaatattgagtaccttttcatatacctgcttgccatttgtatgtctactttgtagtaatgtctattctgatcttttgcccattttttattgtattattcgattttttattgacttgtttgagctctttattctggttattagtttcttgtcaaatggatagtttgcaaatattttcttccatttgggggattgtcacttccctttgttgattgtatcctttgctgcatagaagtttttacacttggcatgatcccatttgtccatttttgctttgggtgcctgtctttgtggggtattactcaagaaatctttgctcagtgcaatgtcctggagagttttccaaatgttttcttttagcagcttcatagtttgaggttttagatttaagtatttaattcattttgatttgatttttgtatatggcaagagataggggtctagtttctttctttcttctttttttcctttgctttacttttttttttttttttttttttttttgagacagggtctcactctgtctcccaggctggagtacagtggtgtgatcacaactcattgcaacctccacctcccaggttcaagtaattctaatgcctcagcctcctgagtagctgggatttcaggtatatgccaccatgcctggctaatttttgtattttgagtagagacggggtttcaccatgttgcccgggctggtctcaaacttctggcctcaagtgatccactggccttgacttactaaagtgctgggattataggtgtgagccaccatgtccagcaagtatctagtttcattctactacatatggatatccagttttcccagcaccatttattgaagagactgttctttccccaatgtatgttcttggcacatttgttggtaatgagttctctgtagatgtgtggatatgtttctgggttatctgttcttttccatcaatctgtgtgtctatttttatgccagtaccatgctgttttggttactataactctgtagtataattcgaattcaggtaatgttactccaccagtattattctttttgctcaggatagctttggttattctggatctttcatggttccaggtaaactttagaattgttttttctatttctgagtagaagaattttattttattcatagctattgtaaatgggattactttcttgacttctttttcagattgttcactgttggcacataaaaatgctactgatttttgtatgttggttttgtcttcttcaactttctgaatttattagttctaatagtttttttggtggagtcttttggtttttccaaatataaggttatattatctataaacaaggataatttgacttctttctttctagtttggatgccctttctttctattttcttattactgtaagacttacagaatgaaatatttaaagtattgaaagaaaaaccccaccaacctatggtaactccatgtttccagttggtagttgcttaggcaaaacaccttggagtcattcttgattctccttgtccctcacatcccacatcctatctgttaggatatcgagatgtaataagaaaaaaaaaattgtaatcctccccttcttaccacctctatttctatctccttggtccaagccatcattatctcttctctggattattgctatagactccatactacagtctaaacagagcaactagaatgattaaagtccaatctagtactactacagaagcttcccatttcactacctgtctatgaattacttaatttctctgtgtctcagttgcttcatctgttaaaagagaataatacctcctcaggagattgtgtgattgatgaggaggcacttacttaataccaacctgatgcacagaaaatagtaaagtttagcgattttttttattattttaatttccaatttgcccttcaaatcagaagcttagttttgtcttattcttcagtgcttgaggtgggagggtttgtagaaacatttggcttctgaatacctagctcattgctgtcaagcagaatcctccatcttttagtgcctgaaaatattcagatgtccagaaacattaaccaaaggaaattccatttctagctctgctgtttgtataggcaatgtagtgggtcagttttctgcactgtgtagaaattgctttgtcagtggaaaatgttattttcgtcggttttacagttcctaacttttgaggcatttgttccctggaggatactaaaagaaggaaatcttcagacagctgcccactgaatttttgygtgagcctttatttgatattttacccagaccccttttggttttttattacagtaacatcgcatacctaggttttttttttcttcttcatataagccttacctatctggaactgtcagtactaggaaggtacttatagtgttgaatgttcccactcatatttcctgttatgccttatgctttttataacaagccaaaaagaggaagaaagatttcaccatagatttgctaaaggcaatgtgggatgcaatgagtgtggtttaatggaagagccctggggtgcggcctctgagccttgctctgccactgacacctgtatgactgcctgggcttgagttaaacgttctgcataaattctagcagaagaggctagctcaaagaggagattcagtgtctgaatgtctgagagagtgtgaaaataagaaaagttggctgggcgccgtggctcacacctgtaatgcagcactttgggaggccgaggcaggcggatcacctgaggtcaggagttcaagaccagcctgaccaacatggagaaaccctgtctctattaaaaattcaaaaaagtagccaggcgtggtggtgcatgcctgtaatcccagctactcaggaagctgaggcaggagaagtgcttgaacctgggaggcagaggttgtggtgagccaagattgcgccattgcactccagcctgggtgacagagcgaaactccgtctcaaaacaacaacaacaacaacaacaaagtcaagtcacttgagacctcaacccactgacaagagaagagggactggggcagacccaacctgaactggttctgtaaagcagccacggcacagaccagagtggactgtgggcctgagcagtgtatgcccctggggcctggaaagtaggggctgggacttcatttcttgaatagagggagaaggaaagacacttgagaatctggtaaaaacaaaaacaacaacaamaaaaaacccaaaacaaataaaacattctagtagcttcagsccctccactgggcatggtgtcttcttgacccacagacaataggcaggcaaagtagatggaagcaagtgctaacatgatacacagctcccagggcttagacacttcccacctcagcaagctggacccatccaagctgtggtgtcagggtagaacaaatgattctttttttcgagatggagtttcgctcttgttgcccagtctggagtgcaatgctgagatcagctcactgcagcctccgcctcccaggtttgagcaattcacctgcctcagcctcctgagtagctgggattacaggcgcctgccaacacgctcagctaattttttgtattttaagtagagatggggtttcaccatgttggccaggctggtctcgaactcctgacctcaggtgatctgcccgccttcgcctcccaaaatgctgggattacaggcatgagctaccgcgcccagccgaacaaatgattcttatatgtagattctttagggagcagctaagccagcccccattgactgggggagatgatggtagctttgagacactcctagcagctgcagttttgttatcctgcaccctgttcactttccagggccatgcacctccacggaaataccttatctataagccttgtgtctctacttcagtttaggtctcctagactgtaacggagaacaaaaaaaaaaaatagaccaagttttaggcattgcaggaaaaaaaagtgtgttcattctctgagcctccgaagtaatgcagctatatttataagtggatcagtaaaaggagaaacttctttaggtttttagacctgggattcagcattgagattttctgtgctctgaaggactatccagtaactgtccttccaataactttccttagtttcttgttacaatcgcgattccggtggttatcaaacttcttcctagtggattgcttttccactcttcattgacattacttgttcccaagtttttttttgctgttgcaaagtgttgaaataaacatctttgtacttaaatgatatatgtgtaacagtaaatttttaacattaaaccactgacttaattcatttattgaattttgttgtagtatatcacacatacagtataccaatcatttatcaataactgatgtgttcacaaaatgaacacatgctcataatcactactgatatcaagacagaaaattaccagcaccctggaagcctctctcagcttctctctctcaatcactaccacctccttcctacccagggcaaacagtatcctgatttctaagatcattgatttgttttacctacttagtagctttaaattttttaaatgaagatgtagtatattattctttggaatctggctccccacctcctcatcattatgttgagattcatctgtgttgttgctaatgtagcagagttcatttttttgttactgtatagtgtatcattatatgcgtagatcacgttttttaatttattctttctcattgcactgttctgcaatgccaccttgccgtaaaccaggcatctgcatctgaggggctgtttctggacctgtcattctgtttcatcgatatatttatctatccttgtgccaaaaccctactgtcttacttatggctatatcattaacttagctaatgtttagagctatgtaatgtagataattgtagctgtataatagtaatgtatcgatatctggtagaataagttcttctactttgttattcttttaaaactaccttgactattcttggccctgtgtatttccatataacttttacaatcaagttgaaattactccctcccctccaaaaaaaaaaaaaaagcatgctagaattttgattgggaattctttgaggagaatggctatctttattatattaaatcttcctgtccctgaaagtggtatgtctgtttatgtgggtctttaatttctctcaatagtgttttatagttttctgtgttaaggttttatatatcttttattgatttactcttacatattcagtgggcttttaaatgtaataaatggtatttatcacaaatttatcataaagattcctaattattgcatgtattagaaacatttttatatattaaagcataggtttttaattataagattttatgagatttacggtttatatcattttaagaatcacttaatattcaaattcaaatcaccatgagaattctgggtaaattgagaaaagtaaagttggattaaatccagggttgtatccttggagaattcaaaaggaaccaggaagagcttgttcctaaactgcgtgagttctgtgttggttgcttgagagagattgcctagggcttgcttcctctctcagctaaagtgattgggatttggcagtcagggtgcttttgtttttagggtaccctgagccctctcctagccagcccacatttgtgagcactcggtaaacacagagcaggagggaattacagtgaatggggatttccctcagtsctgcccactggctgctcttgaactgacaggcttctttctcattctaaactcaccagcagtggagcagtaaacccggccacggtcaggcatggcacatgtcctgcaatgatggggactggacctgttgccttaaactcacrcctgctttgtttttccaggtctataagggagaattccaactacctgactttcttaaagaaaaaccacaggtactgtgtctgctttttcctcctgatgtatactagattggctcttgcattgaagtaatatttttaaagagataatgaaattaaaaagacagaaacaagaaaaccaaaaagaaaagaagaaaagggatagtgatatgtgctggggaagaaagatcagcgtctgggacttgttgattttaacaataatttaacacagtcttaatttcagagagctcagtgtctcccaaaaccagggaaatactttattgataaccaaattctgattgcttgaggtcctgcacaagccgcccagtgggtaaagctgctccagcgttccagtgcctaatttgaaataaaaatgttcagcgaccctctctgttcctactctgtgtactgtacatccttgcccctttgacttttctcatttggagcccagatgacttatatatacacatagtcactggcccctgggaaggacagtgagagtttgaaggattaaagccagcatggtggctcatgcctgtaatcccagcaatttgtgagaccgaggttggcagatcacttgaagtcgggagttcaagaccagcatggccaacatggtgaaacctcatctctactgaaaatataaaaattagccgagtattgcagaatttgcctgtaatcccagctacttgggaggctgagggagaatcacatgaaccgggagktggaggttgctgagccaagattacaccactgcactacagcctgtgtgacagaacaagactgcctcaaaaaaagaaaaaattagctaggcatggtggcgaggcctctggtcccagctacttgggaggctgaggcaggaggatcgcttgagcccatgaggtggaggttgccatgagtttagattgtgccactgcactccagcctgggtgacagagtgagaccctgtctcaaaaataaaaaaaattaagcagattcagagttttccctgtaacgtcttctctcactgacttgcattccaatcctgtttcctgggttggaaagaaacagggagtctcacggctgacatgcctagaggagcccggcatcctgcctctgggcatcactgtcatgcccatatggaagtcagaaaaaatggacacycatggcctgagtgcagccgacttccctttccagcaaggcgatgatgcatgttgcctccaggctgctgctgtcagtgattagcttgtcaataggaagaggagactcagttttgaactcagtttctgaaagcgttccagatagaggttggtgaagcaacagcacctcagagacttgtgtgaagtccagttgcctgatgcaagcctggagtaaatgggctgccctctctgagggaagccatgtctcacaccagagttgaagcctcttccttcctgacccttttctgaaaacacttagccgccagtaattgatacatatgacttgagtgtttcaaagtactttcaaggcatattcttattcacatatatttactattcatccattcattcacttattcaccaattgtttacccagtgtctactatggtgaggaattagagtaagtcctcaggagtcacgggggaaagaaagacctcaaggagctcctgatttatccagaagaatccgaccacctcgtgcagacaaggggacacagagctctgggcccaggctgggcatgatgtcccagaaacctgggcagattcatgaacagactgacaccggctgtggaaattggagccagagaatattccaagaggctgtcttgaaggaatataaaatccaaaagcgcccaggtgcggtggttcacgcctgtaatcccagcactttgggaggcccaggtgggtggattgcctgaggtcaggagttcaagatctgtttagccaacacagtgacaccccgtctctactaaaaatataaaataattagcaagacttggtggtgtgcgcctgtaatcccagcctgggtgacagagcgagagtctgtctcaaaaaaaaaaaaaaaaaaaaaaaaaaattccaaaagccggtttgcataacaaatctgaagaagtcaagaaaaggtatttgagactaaaactaaagggacactcctgcttcacaacatacctaaaaatatttccaaatggattgcacacctaaatgtgaaaggcaaaataatgaaagttgttagaggatatagaagagccaggcatgaggctcacgcttgtaatcccagcactttgggaggcaggcagattgcttgagtccaggcattcaaaaccagcctgggaaacatagccaaacctcatctctactaaaaatacaaaaaattagctgggtgtggtgcatgcctgtagtcccagctacttgggaggctgaggtgggaggatcacctgagccccagaggttgaagctgcaatgagccgagatcacaccactgcactgcagcctgggcagtcaatcctgtctcataaaaacgaagaagataatagaggaaccatctttatgaccataagaggacaggatttcttaagccctaaaaagtactgattattaatttaaaggtagataatatgaactacattataattgaggatgtttatgtaataaaaatcatgagagtaaaatagtgagcctaagtaggagaatatatttgaaacaaaggacttatctggagccgagtgcagtgactcacacctgtaatcccagcactttgggaggccaaggcggctggatcacgagggcaggagttttagaccagcctggccaacatagtgaaaccccatctctactaaaaatacaaaaaaaaaaattagctgggcgtgttgggcacctgtaatcccagctacttgggagggtgaggcaggacaatcrcttgaactcaggaggcagaggttgaagtgagctgagaacgtgccactgcactccagcctgggaaagattgcgagactccctctcaaaaaaaaaaacaaaaaacaaacaaacaaaaaactcatctgtggaatatagatcatcatcgtaagggaatttttttttaaattgggcaaaaagcctggacaacatagcaagaccctatctctatcaaaaaattagctgggcagggccaggcgtggtggctcccacctgtaatcccagcactttgggaggctgaggcgggcagatcacttgagattaggagttcaagaccagcctggcaaacatggcaaaactccatctctaaaaacaagtaccaaaaaaaattagctgggtgtggtggcacacacctataatcccagctgctcctgaggctgaggcaggagaattgcttgaactcaggaggcagaggttgcagtgaaccgagattgcgccactgcattccaacctgggtgacagagcaagactccatcaaaaaaaaaaaaaaaaaaaaaaaggctgagcgtggtggcatacttgggaagctgaggcaggatgatctgttaagcccagacagctgtgattgtgccactgcactacagcctgggttacagagggaaaccttgtctattaaaaaaagaaacaatcatgcagaagtgtgcacacagagacacacacacgtagaaaagggcccataaggtcttcagtttaacttctaatgaaaatcagcagaaactcatagaaccttcagattgaataattagctagaatggttcataaaactcggtaaagtgtagtacttaacaatgacagttttataaaggatgcagatcaggaccagccataagatagaagtgggcccaggagggtcctgaatgcakagcttctgtgcctcctccctatgaaagcagggcacgtcaccctcccggcacacccatgtgttcaccaaccgggaagtgccactgaacttccacacccagcatttttattggggtttatttatgcaggcaagattgatcaaatcgttggtcatgtgttagaactcaatctccagccaacctcccctccccagagttgacgtgggctccaagccccagcccctgatcccatggttggtctttgtggtgagcagccccatcctgaatcatctcataacataaatccagatgtgatccaagggcatcagaaataacaaagacactcttgttacccaggaaattccaaggattcggcatttccctcccaggaaccagggggaaaggccagtcagattcttgagcataccacagtagtgcactgagttcatctgaaagtgaacagagcctgcgggccacccctcatgtttcagtggggacggtcacttctcatgctgaccaacttcaaggacattaaaacatcttttctttccttcaacagactgagcaagtggagtagcagaaccaggagcctcttccatacatgaggtgagggttgggggacattgccaggtctttctgtttcccactcgggctcttgcagggggctgggtggccaaggtggagagcacagctctggagtccgtctgccagggttggaatcctgcctcttcactttctgtgtggaagcaagcacattacttcacctctctgtgtcttcatttattcatctatgaaatgaggataatattaacaagagcatggtggtgagaattaatcatcatccaagagcctggctcataataagcgcacaatagtattgttattttcattatgaayyatgaaatatttcagctgaaagggacctggaggccatcaagcccaactccctgtttactgataaggaagctggtcccagagggagcaggtcgtttgtcaggaccatagtccataggcaaggaaacccagaactcaagagtggctgtttacttctggttacctgttcagccagggccccagccacccatccccacctccagtggctttcttygtgtgctggacttgcagatgtttttgccctactgcaatttttgtttgtttgtttgtttcttggttggtttttcaagtttgcccttgcttgttttaatgtattatggatggcttatgtgagtaacctatattgtctcattggactaagtgctacattgtagacaaggccagccttgccttctcagccctttttctatctgagtatgtggccctcatcaggcacatgtccagggacaccagctcatgagtggcaaagctggtttctcagcccagatctccaggtgcagctgctcagagttcatacccttgtcccagactttcagtctctgcttatccacccaaactttcttaagatcagttttgctccaaatgatgtggcaaagcctttgatcagttgtaacttgaacagccttttcaaaaaatctgatattggctgggcatggtggctcatgcctgtaatcccagcactttgggaggccaaggtgggcagatcacaaggtcaggagttcgagaccagcctggccaacatagtgaaacctcgtctctactaaaaatacaaaaattagctgggtgtggtggcagggacctgtaatcccagctacttgggaggctgaggcaggagaatcacttgaacccaagaggtggatgttacagtragcmgaaatcgtgccattgcactccagcctgggtgacaagagagagacttcgtctcaaaaaaaaaaaattggctgggcgtggtggtgggcacttatagtcccagctactcgggaggctgaaggaagagaattgcttgaagccaggaggcagagaggttgcagtgagccgagattgcagcactgcactctagcctgggtgacagagcgagacttcrtctcaaaaataaataaataaataaataaaaataaaatctgatattgatagtgattttttctcatagtttacttgctgacctttgttttttttttwtatataatgtttttatttttactttatataatgatgtattgtgcatactccataccaggcataaaataccaaggattttatttgcatatatataagatgatatatatataacagatacgctaaattatatatacatctatatataaaattgtattcagttctcaaaccactctggcaagctggtagtattcctgttttgctagtgagaaaacaggttgaatgtgacttgcggtgcgttgatggattatagacataagaagcacatggacgctggtccgtcatgtcaaaatcccagatggcagcaagctgctaatattgacaggttctaggattcaggtttcctttttgctgaggagcaaatgctgaatgttagtcttatgccctgtgggtctgcatatttaacagcagttatcaggccttggctaattttgtttatacaaaatgctttcaaacttcataggtaatctccctgcccgccccaccaaacacacacaaggcctcatttctttaccagcgtgttgtaggatggaccgcatcagcagttgcctctgcagcatttcaccctggcttgtgtgtggaggttgggaggggccaacctgtgctgaggaggactcaggagaactggggacacagcaaagcccttaggatggatactatctttcttatcttttgggtccctttggcatttcaataacagtatctgtgttctctggagcttcctttaaagaaccttaggatccatttcttcacgtgaggaggaatcagggtgctkrcccctggacacttaaagaaccttaggacccatttcttcacatgaggaggaatcagggtgctgacccctgggacacttaaagaaccttaggacccatttcttcacatgaggaggaatcagggtcttgacccctggacacttaaccttaggacccatttcttcacatgaggaggaatcagggtgctgcccmctggacacttaaagaaccttaggacccatttcttcacatgaggaatcagggtgctgccccctggacacttaaagaaccttaggacccatttcttcacatgaggaggaatcagggtgctgccccctggacacytgaagaaccttaggacccatttcttcacataaggaggaatcagggtcttgacccctggacactttaagaaccttaggacccatttcttcacacgaggaatcatggtgctgacccctggacatctggtgcccctgacagtgcccccacagtagcaacaatagcagatgacagtcagttatttagaaatgggcaggagcagccctggttttggccatctgcttgctttgcacccagcagctacttgcatgcatctgaaagcaccagagtgagggtgtgtgtgcctcccaggcagtcttcctgaggcagctgttctcaacatccatcctcctggcccctgatctgcaggaacctccccaaccgcctggcttgtctaggcctgtagctgggaaggaagagacgaagacacagggagaacacaccgggactccacacctgtaaccacattctgtttgttcgccctaggaaagattgctgccttttcagcagaagggaaattcctaggattggctgtcccctgccaagcttggtggagcgtctgcaccttggctgcgccgcctgtgcatttgccagtttcctcccactgagaggatggaggtgtccgcacagctttgggcctcgtgagggatctgcctcctgagcaaagagctcttgatcccgatttcatgcacagccctgcagtaaggagcccagaaggaacatgtgtttcctgttaaaactcctcttgttctcttttcttacattatgacgtttgttttcaaggagagggtttaaaaatgggatcctgtaagcagacttgggcagtctccttttgaaataggttgtctgtacatgttctaakgttttgtagaacacgtgtgcctgtttaagtgtattgatgtgaataatattamatatcctaattatttaattcattgtattgtttctgagaagttgggaaattaccattatacatttacaacctaatgacttttgtattttatttttcaaaataaaagctttcaatgtgaagcattctggtagttacatgttttcattaatgtgatttcagagaagcacagaccttatcagatgctgatgtgataaaccaaagtttccttggttggctgtattgtagatactcccctggagccatcacctttttttggaggggggtggtgggtagaggcagggtctcgctacattccccagcctgggctcaaacgatccttctgcctcagcctcccaaagtactaaaattacaggtgtgagccacggtgcttggcctgcattaycattttgtagtgaagttttctttttatttcaagagagaacctattgccatccactttgagaatcctgttctatttcatgcttgcagactgtatttaaggacatggaagttactatttccacttgttttctagaagcctttgttatgaaacccaggatgtccagatagtagtaataattcccatattgagtgtgttcacatatgtgccagccatgaaaagggtgtataacatgttatcccatctctgccccaaaacttgtacctatccatttaggtcatatccatatcagtaattgcagtattttctactgtcacttgagccagaaactgaagagtcacacttgatttcacccttttcctccctctttccattcgcatccaagatctttgatcctaccttcaacgtattttttggatcacagcagaataagagtttttagaatgcacatctggacaggagcctccccgcctgaaacatttcagtggcttccatttcacttaaaagagtccagactcctgtcagggccggcagggtcctcctctccatctcatcgcaggcctctctcccaacctcaccgcttgtgctctagaagtatctttattttcagaacatagcaagttcttcctgtctctacatatctcctctctctggaatgttcttccctttggctatttaagatgaagttttgctctgtcacccagctggcctgcagtagcacaatctcggctcactgcaacctccgcctcccaggttcaagcaattttcctgcctcagcctcccgagtagctgaaattacaggcatgtgccaccacgcccggctaatttttgtatttttagtagagacagggtttcaccatgttcaccaggctggtcttaaactcccaatctcaaatgatcctccctcctcagcctcccaaagtgctgggattacaggcgtgagccaccacacccagccccctttgttctttgtctgataggctccttctcaattctgtggtctcggtaagcctcacttactcagagggattttccctggcctcttaaactaaaaggtaattctcccgctgcttgccttcttcatggtcacactttgcagtgtttcatctgtttgttgccttttttattatctgtctcctccaccagccaataagttcctggagttccaagactatgttttttcttgtctgttgtacttttggcacctagcaaactggcactttctagaaaccaagtaaggccggtcgcagtggctaatgcctgtaatcccagcactttgggaggccgaggtgggcggaccacaaggtcaggagatggagaccatcctggctaccacggtgaaaccctgtctctactaaaaatacaaaaaatcagctgggtgtggtggcgggtgcctgtagtcccagctacttgggaggctgaggcaggagaatggcatgaacctgggaggcggaggttgcagtgagccgagatcacaccactgcactccagcctgggtgatagagcgagactccgtctaaaaaaaagaaaagaaaagaaaagaaaccaagtaaaatacttggtgaattactaatcctccaaagagccttctgacatacatactgttttacagatcaggaaacaggctcaactaggtcaggtcacttacacaaggccccccacctagtgccacaggtgacttggcatgtagctgggcccaggcacaagcctgactctaatgtcctctgcagtccacttccctagccctgtccctttccatttaaaatgaatatgtccagcctgggcaacataaggagaccctgtctctacaaaaaaaatttttttaattagccaggcatggtgtgcacctgtaatcccagttactcgggaggttgaggcaggagaattgcttgaacctgggtggcggaggttgcagtgagccaagatcatgctactgcactccagcctgggcgacgagggagaatctctcaaaaaaaaaaaaaaaaattaaaaatactgctgtcagatcaatcttgtgtttaacactgttttaagtcactcatttgctccaaaacctttaattctccaatgcctaacattacatctaaatgtctaagctggccaggcatggtggctcacacctgtaatcccagcactttgggaggccaagaagggtggatcacctgatatcaggggttggagaccagcctggccaacatggtgaaactccatctccaataaaaatacaaaaattagccaggtgtggtggcacacacatgtaatcccagctactcgggaggctgaggcaggagaatcacttgaacctgggaggcggaggttgtggtgagccaagatagcaccattgcactccagccttggtgacagagtgagactccatctaaaaaaattaataataaatgtctaagctattctgctgccacaatgtggccttactgctccctgatatacggtgcctttctcctcccttgtttcattctcttcactttcttcttccagatgctcgtacacccagtccccctacctgggaaatcacaacctcattaagagctcagctatcttaagtcctatttcctcatgaagtctaactcaactgctgcaacttccgagtagcaattaaatcagctccagcataacctcttttttcccttgtctcctgtgttagtattatgtcactaactttgtggggacaaggtcatataacactctagagcatatcagaatgacagaacatcttcagctataacctacctagataccaatatttgcccccaaggcaatgtttgatttttattccccattatgagaaacaaactcacccctccaaacccaaagaatggactcagagacctggagaacagcgaaagtgagacttttaatgatgctcttgtaatattgggtgtctggcagcaggcacacccagcacagtttcaacaagcaatttatcccctagtgcacaggtgcctcccccagttcctcatgggctgtgtattatggggtcacaatcttcccggacattgcctattggtcgttgggtaggggcttcgggtgttttctttagggttgtcctgctgcgttttgttgcagcccacaatgcattgcaatcctagttagctcaggggctcttcaggtatttgacttatgacttaagtagctggggcaggctgataagaacaggcaacacgagctattttgcagctagtaaactttcatcttagactaaacttctttggttcaggtgagggtaactaagggggttgsgggggggtgacaagcaggcattggctgtccaagcaggagcctactgtatcctgttttcttctgtagtctactgacctaagttgatttaaggcactttgtcttggaaatggaccactgtatacatttccttcacccagctaagttttaaattttttttgtagaggtggggtctcactctgttgcccaagctgctcttgaactcttggcctcaagtggtcctcctgcctcagcctcccagagtgcttggattacaggcatgagccacctgttcggccatcattgtttaaacaaaaaagtttagaggactcccaactaggaactattgcaataatctgggccagatattattctagctgggttgaaacaatgaccaaaataaaaaggaggaagatggggaaaggctgggaggtgtacaaccgacaggacttgcaagtaagcagatctggtggcaaaggtcagagaaaaccaaagaagactcccaggtctccaggtgatgaggctagacatggtacatggtagtgctggcagacagagtgggagtgcataccaccacacagttggcccacacactctggctgcaaagggccagggaccgtgtggtctccagcttgctgcctgaatttggacaacccactcactctcactgcctgtcttcacaatttgaaaatgaagctaaaacaaacccgtctctagcttgttttgtttttgtttttttctgagatgaagtcttcctctatcacccaggttggagtgcagtggtgcaatcttggctttctgcaacctccgactcccaggttctagcgattctcctgcctcagcctcccaagtagctgggattcaggtgcccaccaccatgcccagctaatttttttgtatttttttcagtaaagatggggtttcaccatgttggctaggttggtctcaaactcgtgaccacaggtgatccacccgcttcagcctcccaaagtgttaggattacaggtgtgagctactgcacccagcctccagcttgttttaagaatccagtaacatgattatgtttaacaattggcttagatattcagaagctagctggctgggcgtggtggctcacgcctgtaatcccagcactttgggaggctgaggcgggcagatcacctgaggtcaggagtttgagaccatcctggctaacatggagaaaccccgtctctactaaaaatacaaaaaattagccgggcgtagtggcacatgcctgtgatcccagctacgcgggaggctgaggcaggaacttgcggtgagccgagattgcgccattgcactccagcctgggaacaagagctaaactccatctcaaaaaaaaaaaaaaaagacattcagaagctgctgatgtgaacgtttaatgaatttgttttttgttttgttgtttgtttttgttttttgagatggcgtctccctctgtcacccaggctgtagtgcagtggtgagatctcagctcactgcaacctccacctcccgggttaaagcaattctctgccttagccaccctagtagctgggattacaggtgcctgccaccacgcccagctaatttttgtatttttagtagaggtggattttcaccatcatggcccggctggtgttgaactcctgacctcgtgatctgcctgcctcatcctcccaaagtgctgggagccacctcacccggcccgttgaatgaatttcatgagtaaacaaattagatcaaagtaagtggattccatgaagccgagaatgatgtcttctggatatgccacctggtaacccctccttcagcgcactgtgccccttgacaaacaccatggggagcaggaacagaggaggtgggtggggagcacagggacaggcatggtgacatccgctcctcccttactcccgtcccatccacccctttctataatacaatcatttaacaatggtttcccatgtgtaaaatacttgcttcattcaatcacagaatagacacttggtattcaaatttactgaggaagaaactgtttcacatgccaagtagcaacttgaaaaaatcaacaacccttaattagttgtattattgaagtaaaaccaatgtaagggatgtagtgtttatccaggcaagcctggttggcttcttggcttttttatcttccccatttcttcctccttcttaaagtgtaaattttattttcaaaactgggaaaagaggagttcaaggtgggaggtggaggcaggaggatggctttagatcaggagttgaagaccagcctggtcaatattggaagaccttgtgtccagaaaatttttttttttttacttagctgggtgtggtggtgcatgcctgtggtcccaccctctcaggaggctgaggcaggaggatcgcttgagcccaggaatttgaagctgcagcaagctgtaatcatgccactgcattccagcctgcatgacagagcaagaccctgtctaaaaacaacaacaaaaaagggccagactcagtggctcacacctgtaatcccagcactttggtaggctgaggcaggaggatctcttgaggccaggaatttgagactagcttgggcaacatagtgagaccgtgtgtgtgtgtgtgtgtgtgtgtgtgtgtgtgtgtgtgtttaatgaggtgttttggaactgccactatgtagacgtccactgctaaagggctgttttgggtcataaccaagacacatggcctgagagcctgtgatgattatttgtgtttgtgcaaactccagagcagcccaagctcctagactaagtgacactccactctgtaagtcttgagcagaa
